United States Patent Application Publication US 2006/0263774 A1 - sequence listing, part 2

SEQ ID NO: 1657 - DNA, 1311 bp, Homo sapien
cgaggattcagcagcctcccccttgagccccctcgcttcccgacgttccgttcccccctgcccgccttctcccgccaccgccgccgccgccttccgcaggccgtttccaccgaggaaaaggaatcgtatcgtatgtccgctatccagaacctccactctttcgacccctttgctgatgcaagtaagggtgatgacctgcttcctgctggcactgaggattatgtccatataagaattcaacagagaaacggcaggaagacccttactactgtccaagggatcgctgatgattacgataaaaagaaactagtgaagccgtttaagaaaaagtttgcctgcaatggtactgtaattgagcatccggaatatggagaagtaattcagctacagggtgaccaacgcaagaacatatgccagttcctcgtagagattggactggctaaggacgatcagctgaaggttcatgggttttaagtgcttgtggctcactgaagcttaagtgaggatttccttgcaatgagtagaatttcccttctctcccttgtcacaggtttaaaaacctcacagcttgtataatgtaaccatttggggtccgcttttaacttggactagtgtaactccttcatgcaataaactgaaaagagccatgctgtctagtcttgaagtccctcatttaaacagaggtcaagcaataggcgcctggcagtgtcaagcctgaaaccaagcaataccgtcatgtttcagccaagcccagagccctaagattacaaacaactatggccggaacctcctcagctctccctctgcagagttccctaccctaagagaatgttaccacctgaacagtcctcggtgaatctgagaggagaggatggggtaaggcagaagcaccagctgtactactagaagggagcttttggtggtagatcccctggtgtctccaacctgactaggtggacagagctcaaagaggccctcttaccgctagcgaggtgataggacatctggcttgcacaaaggtctgttcgaccagacatatcctagctaagggatgtccaaacatcagaatgtgaggccaaccttctatcagagttaaacttttgacaagggaacaaatctcaaactgatccatcagtcatgtagctagctgtagagcttgcaacttaatagcagcagctgcccaatgccatgtgaagtaacaaactggtttttggtttttttttccccttcagttttaatgttatgtgtaatgtatttaaacccttatttaaataaaacttgttttcagaaataaaaaaaaaaaaaaaaaaa

SEQ ID NO: 1658 - protein, 113 aa, Homo sapien [sequence omitted]

SEQ ID NO: 1659 - DNA, 1454 bp, Homo sapien
gagcagtgcggtggctgccggagagccaacaccacggatcggccccacgccttccaggtcattctctccgaccggccctgcctggagctaagtgccgagagcgaggccgagatggccgagtggatgcagcatctctgccaggctgtgtccaaaggggtcatcccccagggcgtagctcccagcccctgcataccctgctgcctggtcctcacggatgaccgcctctttacgtgccatgaggattgccagaccagcttcttccgctctttgggcacagccaagctgggcgacatcagcgccgtctccaccgagccgggcaaggagtactgcgtcttggagttctcccaggacagccagcagctcctcccgccctgggtcatctacctgagctgcacttctgaactggaccgattgctgtctgcactgaactctgggtggaaaaccatctatcaggtggacctcccccacacggcgatccaggaagcctccaacaagaagaaattcgaggatgccttgagcctcatccacagcgcctggcagcggagcgacagtctctgccgcggccgagcctcccgagacccctggtgctgaggcagagctggttggcgtccctggtgggcaggaaaggaaggcacgccagccggcaggcacactgtcacggctgttgtcatgctgtcgggagcctacagtccacccctgccctgggcggcagaaccaccgagtgtggcttaagacagggtccctccactccagggatccagatcaggtgcccggcacccctgggcatcctgcccgacaggtagcgaatggaggtcgctgggggcagagggtccgagccccgtgggctctgcggatgcacgccctcctcccgggcctccgcctcagtctgcagaatttctgccgagtggcaccgagaacaccatccatctaaggacgaacaaaagaaccaggagggcgggacccccctcttcctctcctgggttgggggctggggccctgagtgcccagccatccttgttcgtgtttgaacactctcctggccacgtggggaagcgggaacacggggtgtctgcgcatgtttcctcctcctagctccatcactgcgcacacagctgcctgcctcgccagatgcaggggggcgggcagccctccctggctgccaggaggctctgcatgcccacagtcctgccctgcctctcccctcaacccggcagtgcctgtagcaccgaggagcaaagggggtggatggggggcttggagaagggcggagcccaccagcctggcatccatgttgacatcttctgactgtcccctgcttggctggagccaggcccttccctagagtttcgtcaagagcctcctggggaaggggtcaggtggtttgggttttgttttttaaaataaaatagacatgttatattgccaaaaaaaaaaaaaaaaaaaaaaaaaaaaaa

SEQ ID NO: 1660 - DNA, 5286 bp, Homo sapien
ggctggcggcggtagctgtcgcccgcttggttgcgtgaccgcggggtccgcgtccgctccctccacccttcgcccttcgcccttcgcctcgtcccggcctccgcggcccagcaacggccgtcatggtgccgtcggcgctccctgcgcggccccgctgagcctcggtgcggcggcgagcgcggtcgagatcgccatgcctacccgagtatgctgctgctgttccgctttgcgtcctcgctacaaacgcctggtggacaacatattccctgaagatccaaaagatggccttgtgaaaactgatatggagaaattgacattttatgcagtatctgctccagagaaactggatcgaattggttcttacctggcagaaaggttgagcagggatgttgtcagacatcgttctgggtatgttttgattgctatggaggcactggaccaacttctcatggcttgccattctcaaagcattaagccatttgtagaaagctttcttcatatggtggcaaagctgctggaatcgggggaaccaaagcttcaagttcttggaacaaattcttttgtcaaatttgcaaatattgaagaagacacaccatcctatcacagacgttatgacttttttgtgtctcgattcagtgccatgtgccattcctgtcatagtgatccagaaatacgaacagagatacgaattgctggaattagaggtattcaaggtgtggttcgcaaaacagtcaacgatgaacttcgggccaccatttgggaacctcagcatatggataagattgttccatccctcctgtttaacatgcaaaagatagaagaagttgacagtcgcataggccctccttcttctccttctgcaactgacaaagaagagaatcctgctgtgctggctgaaaactgtttcagagaactgctgggtcgagcaacttttgggaatatgaataatgctgttagaccagtttttgcgcatttagatcatcacaaactgtgggatcccaatgaatttgcagttcactgctttaaaattataatgtattccattcaggctcagtattctcaccatgtgatccaggagattctaggacaccttgatgctcgtaaaaaagatgctccccgggttcgagcaggtattattcaggttctgttagaggctgttgccattgctgctaaaggttccataggtccgacagtgctggaagtcttcaatacccttttgaaacatctgcgtctcagcgttgaattcgaagcaaatgatttacaggggggatctgtaggcagtgtcaacttaaatacaagttccaaagacaatgatgagaagattgtgcagaatgctatcatccaaacaataggattttttggaagtaacctaccagattatcagaggtcagaaatcatgatgttcattatggggaaagtacctgtctttggaacatctacccatactttggatatcagtcaactaggggatttgggaaccaggagaattcagataatgttgctgagatctttgcttatggtgacctctggatataaagcgaagacgattgttactgcactgccagggtctttcctggatcctttgttatcaccatctctcatggaggactacgaactgagacagttggtcttggaagtaatgcataatctcatggatcgtcatgacaatagggcaaagcttcgagggatcagaataataccggatgtagctgacctaaagataaaaagagaaaaaatttgcagacaagacacaagtttcatgaaaaagaatgggcaacagctgtatcggcacatatatttgggttgtaaagaggaagacaacgttcagaaaaactatgaactactttatacttctcttgctcttataactattgaactggctaatgaagaagtagttattgatctcattcgactggccattgctttacaggacagtgcaattatcaatgaggataatttgccaatgttccatcgttgtggaatcatggcactggttgcagcatacctcaactttgtaagtcagatgatagctgtccctgcattttgccagcatgttagcaaggttattgaaattcgaactatggaagccccttattttctaccagagcatatcttcagagataagtgcatgcttccaaaatctttagagaagcatgaaaaagatttgtactttctgaccaacaagattgcagagtcgctaggtggaagtggatatagtgttgagagattgtcagttccgtatgtaccacaagtaacagatgaagatcgactttctagaagaaaaagcattgtggacaccgtatccattcaggtggatattttatccaacaatgttccttctgatgatgtggttagtaacactgaagaaatcacttttgaagcattgaagaaagcaattgataccagtggaatggaagaacaggaaaaggaaaagaggcgtcttgtgatagagaaatttcagaaagcaccttttgaagaaatagcagcacagtgtgaatccaaagcaaatttgcttcatgatagacttgcccaaatattggaactcaccatacgtcctcctcccagtccatcaggaacactgaccattacttctgggcatgcccaataccaatctgtcccagtctatgagatgaagtttccagatctgtgtgtgtactgatcggcgcatgaagacctcagcatatgatttgtaaagcctaaaaattaaggccaagctgagctttcagggtttacttaatgtgtattaacatacttcttgaaaataatgatggaacatatctttaaccaaatgtttggcataccatattagaagttttggagctatatataatttcgagtactttcaaagatagatttatgccatgttaatttgctttgaggttcctgttgcctttttaagttgaacatgttttggtttcactttattccactgttaagtagtatgttttaaacttttcacaaatgtaatgttttttaaaaagtaagccttcagaggattgaaactgtataaattgtttatctcttaaacatctacacagccgcttagatgtagaatttttgttgttgttttctgcaaaggcagatacatttaaatatattcctagtcctggggctgcaaaactgttcggtggctttttgtccccatgctttagataagctgggataggcaccttgctattcagttactataataatatgtgataggcattcctcatcttcttcacaataataggacatctgttgaatagcattcctcgaatataaccctaaaaacgccatactttaaattgtctggttcttgtaatattgtgtttcctgccaagagtttgaccattctgcttgagaagtgtagagcttactcttggagtaccaaactgtgcaatatttttacatcataagatgtattagtttacaggctgtgctttgaaattatagtagtattttgctgtggctccattaattaaatgagatatatatttagtgcagaaaaaagacatttaaaacagctattagttcacctgtgaagagtctgtacattttgatttctattaagagcacatttatttacatttgtatattattttaaatcctcatagtcaaaaaattctccagatggacttttaatttgtaagatttgaactgtgacttgtatacatctgtttagaatcaattatatttgaaaagctgcctgtgttttaacagtcaagtgtgctaaagtttgtcaatttaagctgcttttgatttcagctaccaagattacaggtgcactctacacataacactgacagacccataacattacatacatcttagtgaattctatcacatggtaaaatgaacagctttctttgtaactcataaaattctcttaggacatttttataaagtcacctgtttatagttctatcttttcagattccatttctttttacataaaacagcatacatatcaaaaactgtagcctagaatacagtttaatttttggcttttgtttttgtttaaaaaattgcagtgaagaatgggatgtttgtgtttatggctatttgggcacctttagtagaaacagacaaaagtaaggaaacgataataggacaagcatacttgaaaatttctgaatacttaaacaaaagcgcaacatcttgaaaaccagtctagtcattgaaacctatgaaatgacactgaaagatcctgggctgcttcttaaataagtagatcagcaagacttgtttcagagtgacagtggagtcgttaccgctggaggactaaagggccctgtggcagctgtcactggaactttgcctcttgatcaggaaaaatgcttcaccagtccgtaaagccaagttgtattttttttattgcccttttttccttctgtatttttaaagaaggatgttaatttttgactatatattttaaaaaaatctaagcagggggacatgcaaaaacaatcatcatccacttggatgtcattttatagattaacactgtgtgcttttgtatggaaaaaatatatataatttaatagtataaaaaataaaatatatattcatttgcacttacgtgaaacacaaactttgctctacaaaatttcgtgtttcttagtgattttaaaatgcatgtattgcatgtaaaggaaaaccattacaattaatgtttatcacacctttatcttggtctttgttgatttgggttttgttggggtttttgttactgtttttaaattacagtaggcttctatatatcctggatttctgaactggtcttgttgacaaggattcccaagaaatggatcttttcactggctgactctcccatatctgcaagagattctgcaggaactgggtgtgcacacggtgttgtagccagttcaggtactgaatatttaggatttggtgaagttcactgtattgctatatttttgtagataaataaaactcaataaattgttaatcattctctttttgctgtatagaattgcttatatcactctttctttcatgacattggttaacatttaaatgttcctcctgtacttgtgttgtctgtgaccgcttatagagttttattgttattggtgtttacctgaatacctatgcgtacacacacacatatttccttaatacttctgaactcattatcttttagaataataatactactacactttaccagcaattaacttctccctacccaaaatgtttttcttcctgtctgaaaatggaactaatttgtcttattcgtgcttatatctgtattaaatgcaataaagttagtttttgaaatgt

SEQ ID NO: 1661 - protein, 885 aa, Homo sapien
AGGGSCRPLGCVTAGSASAPSTLRPSPFASSRPPRPSNGRHGAVGAPCAAPLSLGAAASAVEIAMPTRVCCCCSALRPRYKRLVDNIFPEDPKDGLVKTDMEKLTFYAVSAPEKLDRIGSYLAERLSRDVVRHRSGYVLIAMEALDQLLMACHSQSIKPFVESFLHMVAKLLESGEPKLQVLGTNSFVKFANIEEDTPSYHRRYDFFVSRFSAMCHSCHSDPEIRTEIRIAGIRGIQGVVRKTVNDELRATIWEPQHMDKIVPSLLFNMQKIEEVDSRIGPPSSPSATDKEENPAVLAENCFRELLGRATFGNMNNAVRPVFAHLDHHKLWDPNEFAVHCFKIIMYSIQAQYSHHVIQEILGHLDARKKDAPRVRAGIIQVLLEAVAIAAKGSIGPTVLEVFNTLLKHLRLSVEFEANDLQGGSVGSVNLNTSSKDNDEKIVQNAIIQTIGFFGSNLPDYQRSEIMMFIMGKVPVFGTSTHTLDISQLGDLGTRRIQIMLLRSLLMVTSGYKAKTIVTALPGSFLDPLLSPSLMEDYELRQLVLEVMHNLMDRHDNRAKLRGIRIIPDVADLKIKREKICRQDTSFMKKNGQQLYRHIYLGCKEEDNVQKNYELLYTSLALITIELANEEVVIDLIRLAIALQDSAIINEDNLPMFHRCGIMALVAAYLNFVSQMIAVPAFCQHVSKVIEIRTMEAPYFLPEHIFRDKCMLPKSLEKHEKDLYFLTNKIAESLGGSGYSVERLSVPYVPQVTDEDRLSRRKSIVDTVSIQVDILSNNVPSDDVVSNTEEITFEALKKAIDTSGMEEQEKEKRRLVIEKFQKAPFEEIAAQCESKANLLHDRLAQILELTIRPPPSPSGTLTITSGHAQYQSVPVYEMKFPDLCVY

SEQ ID NO: 1662 - DNA, 3414 bp, Homo sapien
ggcaggagggagggagccagaggaaaagaagaggaggagaaggaggaggacccggggagggaggcgcggcgcgggaggaggaggggcgcagccgcggagccagtggccccgcttggacgcgctgctctccagatacccccggagctccagccgcgcggatcgcgcgctcccgccgctctgcccctaaacttctgccgtagctccctttcaagccagcgaatttattccttaaaaccagaaactgaacctcggcacgggaaaggagtccgcggaggagcaaaaccacagcagagcaagaagagcttcagagagcagccttcccggagcaccaactccgtgtcgggagtgcagaaaccaacaagtgagagggcgccgcgttcccggggcgcagctgcgggcggcgggagcaggcgcaggaggaggaagcgagcgcccccgagccccgagcccgagtccccgagcctgagccgcaatcgctgcggtactctgctccggattcgtgtgcgcgggctcgccgagcgctgggcaggaggcttcgttttgccctggttgcaagcagcggctgggagcagccggtccctggggaatatgcggcgcgcgtggatcctgctcaccttgggcttggtggcctgcgtgtcggcggagtcgagagcagagctgacatctgataaagacatgtaccttgacaacagctccattgaagaagcttcaggagtgtatcctattgatgacgatgactacgcttctgcgtctggctcgggagctgatgaggatgtagagagtccagagctgacaacaactcgaccacttccaaagatactgttgactagtgctgctccaaaagtggaaaccacgacgctgaatatacagaacaagatacctgctcagacaaagtcacctgaagaaactgataaagagaaagttcacctctctgactcagaaaggaaaatggacccagccgaagaggatacaaatgtgtatactgagaaacactcagacagtctgtttaaacggacagaagtcctagcagctgtcattgctggtggagttattggctttctctttgcaatttttcttatcctgctgttggtgtatcgcatgagaaagaaggatgaaggaagctatgaccttggagaacgcaaaccatccagtgctgcttatcagaaggcacctactaaggagttttatgcgtaaaactccaacttagtgtctctatttatgagatcactgaacttttcaaaataaagcttttgcatagaataatgaagatctttgttttttgttttcattaaaggaccattctggcactttaatgataaaatcccattgtatttaaaacatttcatgtatttctttagaacaacataaaattaaaatttaacatctgcagtgttctgtgaatagcagtggcaaaatattatgttatgaaaaccctcgatgttcatggaattggtttaaacttttatgcgcaaatacaaaatgattgtctttttcctatgactcaaagatgaaagctgtttcatttgtgtcagcatgtctcagattgaccttaccaagttggtcttactttgttaatttatctgttgtccccttcctctcctctgccctcccttcttgtgcccttaaaaccaaaccctatgccttttgtagctgtcatggtgcaatttgtctttggaaaattcagataatggtaatttagtgtatatgtgattttcaaatatgtaaactttaacttccactttgtataaatttttaagtgtcagactatccattttacacttgctttatttttcattacctgtagctttgggcagatttgcaacagcaaattaatgtgtaaaattggattattactacaaaaccgtttagtcatatctatctaatcagatcttcttttgggaggatttgatgtaagttactgacaagcctcagcaaacccaaagatgttaacagtattttaagaagttgctgcagattcctttggccactgtatttgttaatttcttgcaatttgaaggtacgagtagaggtttaaagaaaaatcagtttttgttcttaaaaatgcatttaagttgtaaacgtctttttaagcctttgaagtgcctctgattctatgtaacttgttgcagactggtgttaatgagtatatgtaacagtttaaaaaaaaagttggtattttataagcacagacaattctaatggtaacttttgtagtcttatgaatagacataaattgtaatttgggaacataaaaactactgaataaatcatgtggcctaatattgaaaatgtcactgttataaattttgtacatttttgatcaaatgtacatctcccctttgctaacggccgtctgctctcaggttgacgtgggtttgatttctaagtgtttcacagtgtctgtaaatcaagaccaaagagcctgtcgatgagactgtttattaccagattcacttctgaattggccagaggaaatctgaatgtattatcctgtgtgtgtctaggtagagatattggaaggctgccaggggatttcgaagtttgcaacctttataggataactgatggcaatattaagacagacgcctgcttttgcaaataacttacaagactgtaaattccaaagatctgaatggggctttcctgatgttggtatctaaggcttaggcctatagattgatttacctttggaattgtgctccaaatgtctactgaagcttaaccgaagaactaataaatggactacagtagctcacgttacagggaaccaccctaggcagggaggctctgtgtgttaaaatgagggtctcactgctttaggattgaagtggctggaaagagtgatgcctggggaaggagatggagttatgagggtactgtggctggtactttctgtactaaacatttcctttttctattttaccactaattttcttttaaactgtgagccgtccaagtcagaagaagacagcaaaaaaagcaacttttccaacatacaatttacttttaataaagtatgaatatttcattttgagaacattccctggaattgccacataattcattaaaaacatttttttaagcaacacttggaacagtgtttactttaaatccttaatggccttaattaattctcagattcctgccccatcacttacagaaccaattcactttagagtgactaaaaggaaacgatagcctagctttctaaagccacgctgtgtccctcaattacagagggtaggaatgggtatacctctaactgtgcaaagcagagtgaaattcaattcatagaataacaactgctgggaatatccgtgccaggaaaagaaaaatttctggcaaatattttgtcactgctgtaaagcaaaatatttgtgaaagtgccaaaataaagtctgtcatgccaaaagt

SEQ ID NO: 1663 - protein, 397 aa, Homo sapien
GRREGARGKEEEEKEEDPGREARRGRRRGAAAEPVAPLGRAALQIPPELQPRGSRAPAALPLNFCRSSLSSQRIYSLKPETEPRHGKGVRGGAKPQQSKKSFREQPSRSTNSVSGVQKPTSERAPRSRGAAAGGGSRRRRRKRAPPSPEPESPSLSRNRCGTLLRIRVRGLAERWAGGFVLPWLQAAAGSSRSLGNMRRAWILLTLGLVACVSAESRAELTSDKDMYLDNSSIEEASGVYPIDDDDYASASGSGADEDVESPELTTTRPLPKILLTSAAPKVETTTLNIQNKIPAQTKSPEETDKEKVHLSDSERKMDPAEEDTNVYTEKHSDSLFKRTEVLAAVIAGGVIGFLFAIFLILLLVYRMRKKDEGSYDLGERKPSSAAYQKAPTKEFYA

SEQ ID NO: 1664 - DNA, 1678 bp, Homo sapien
ctttttatttatgagacagctggagtgctgattgttaatagtgaatatccggcagaaaggaaacaagccttaatgaggaatctgttgactccactaatggagaagtttaaaattctgttagaaaagttgatgctggcacaagacgaagaaaggcaagcctctctagcagactgtcttaaccatgctgttggatttgcaagtcgaaccagtaaagctttcagcaacaaacagactgtgaaacaatgtggctgttccgaagtttatctggactgtttacagacattcttgccagccctcagttgtcccttacaaaaggatattctcagaagtggagtccgtactttccttcatcgaatgattatttgcctggaggaagaagttcttccgttcattccatctgcttcagaacatatgctcaaagattgtgaagcaaaagatctccaggagttcattcctcttatcaaccagattacggccaaattcaagatacaggtatccccgtttttacaacagatgttcatgcccctgcttcatgcaatttttgaagtgctgctccggccagcagaagaaaatgaccagtctgctgctttagagaagcagatgttgcggaggagttactttgctttcctgcaaacagtcacaggcagtgggatgagcgaagttatagcaaatcaaggtgcagagaatgtagaaagagtgttggttactgttatccaaggagcagttgaatatccagatccaattgcacagaaaacatgttttatcatcctctcaaagttggtagaactctggggaggtaaagatggaccagtgggatttgctgattttgtttataagcacattgtccccgcatgtttcctagcacctttaaaacaaacctttgacctggcagatgcacaaacagtattggctttatctgagtgtgcagtgacactgaaaacaattcatctcaaacggggcccagaatgtgttcagtatcttcaacaagaatacctgccctccttgcaagtagctccagaaataattcaggagttttgtcaagcgcttcagcagcctgatgctaaagtttttaaaaattacttaaaggtgttcttccagagagcaaagccctgaggactggatttccctgtgcctacttcatgatcatgaattccagttaatttataaagaggcgatttttgtgtgccattcacactggtctttttcacattgttttgagcttattgcagtatatgttttgggatttttctgtaaaatgggtgtaattttcctaatacaggtatgtaacaacaaaagaagttgcctgcatgccggtccaaattgttctgtataaagatgctcttaaaagacacaagagttatcctagaaccttaattcttttttatttgaaattttaagtcaagtcctttataaagaccatagcagtggaaaacagtgtactttttaaaaaattgctgaatataaaatctttgagaattttctttatgtgtgaagacacaaagtatgggggaagacagcaatcaaaactaactttttgtagatagccatttcatttctttaaactgtttcaacgccaatatgtattctacaaaagagaatggttttaggctccagtgttatacttttttttatatatatatataaaaataaactttacgtagtgaaaaaaaaaaaaaaa

SEQ ID NO: 1665 - DNA, 2796 bp, Homo sapien
ggggagtaggtcgggaagttctagtagtggtagttccagtagcaatagcagaactagtagtactagtagtactgtctctagctcttcatacagttctagctcaggtagtagtcgtacttcttctcggtcttcttctcctaaaaggaaaaagagacacagtaggagtagatctccaacaatcaaagctagacgtagcaggagtagaagctattctcgcagaattaaaatagagagcaatagggctagggtaaagattagagatagaaggagatctaatagaaatagcattgaaagagaaagacgacgaaatcggagtccttcccgagagagacgtagaagtagaagtcgctcaagggatagacgaaccaatcgtgccagtcgcagtaggagtcgagataggcgtaaaattgatgatcaacgtggaaatcttagtgggaacagtcataagcataaaggtgaggctaaagaacgagagaggaaaaaggagaggagtcgaagtatagataaagataggaaaaagaaagacaaagaaagggaacgtgaacaggataaaagaaaagagaaacaaaaaagggaagaaaaagattttaagttcagtagtcaggatgatagattaaaaaggaaacgagaaagtgaaagaacattttctaggagtggttctatatctgttaaaatcataagacatgattctagacaggatagtaagaaaagtactaccaaagatagtaaaaaacattcaggctctgattctagtggaaggagcagttctgagtctccaggaagtagcaaagaaaagaaggctaagaagcctaaacatagtcgatcgcgatccgtggagaaatctcaaaggtctggtaagaaggcaagccgcaaacacaagtctaagtcccgatcaaggtagtatactttttaaagtattttgtctgatttttaaaaaaaattgactgaatttattcaaagttgaaagtgtcctttctctctctctttaataaactcagtttggtacttgataaataatcatagtcttaaatgttagaaatcctatataatattatttatttaaaattgcagatttttaatttaaaatacatttttatttttaaattttgtcttttcccttttttttcagatcaacaacccctccccgtcgtaaacgctgaggaatgatgtggcaagaatgccatgatgttctttaaaaaaattccatgagttttaagggcttgtctcattatagaggcacattgtggctgtgtaggtgaaaccagaatcttttttttttaatctgtaaataggtgtactttttccaatgctgctccaagttacttaataggatttctttgtattacgtttttttcaaaaaatatagtgcataataagactataaacatgccattctctttcagctgtaatgttcttaaaattattcttgaatgtactgtgatgtcaataaagctctttagttcatttttgttaaactcttgcaccttaattttatggttttaatctaaggaacgtacttttataaaaaggcagctggaattttgtataacaggttttaaaggtaccttctctcacctcccccaaagaaaatggtttttacttaatagtttgtcaaagtttgtaaattgtacccatggacttttgccagattccaactttaagggtatgaaagagggctagaaatagacctttacttttcatttggaagtatttgacaactttctaaacttttcttcctattttggggattttcaagtaatatattctctgtgtgtataacgtgtggttcactcctgtaaaatgaaattgctggaatcaatcaagccagtgcaccagtagagttatttgtaaggaacgattgtgtttgacagtaatagtcaagtctggaactatattctacagtcacccacttctgttttagaagcattttgaaacactttttggggttatagaaataagactcatgattcaatatatttatttatatttttaaagtataatatgacctcaaatcaatggaggaatgctgtattatgcaggtttgtgtcaatttcatgacattaaaattgtctgattttgtccgtttcttaaaattatgattagtgagtggtctaacagtttaaggcattgataacttacaagtagagtggggctctcaaagcattttaactcagttgctttagggtccatttttttatgtaatcacttactcagtgataaatgaatctctgaaaacaaatgcttttacattttaatttaaaaagaaaacaggtgcaggccacagaaaagttttaaagtatgccttcttaccagcaatagttcattttaaaaatcatgccagatttttgccaagatcagtgtttcctcaacatgaagatagaaatagatttgtatagtgtgctcttgtacctctacatagattattatataattttgagcagttacacatttatctaaaggaaataaatcaactgtgaataaatgcatgtttaccaaaatggctgtttacagtgcattcagttctgatatttataaagatgacatttcacagaataactttaaaatagtttgaaattctatatagtttagacatcgatcacatctggagacaaaataaaatgtgcaatattttttatgtaggcgagctaacacagtgtacctaattgcagaattatctgattaatttgtaatagataagttgtataacattttcatatcttaaaatgttttttagatcaatcttgaagtgaaatattttcaaaataaaattctacagaaaaaaaaaaaaaaaaaaaa

SEQ ID NO: 1666 - DNA, 8434 bp, Homo sapien
aggccacattgcagttgggcagcaagggcttggtagtgtgaaggacccaagtaactgtgggatgcctctgacccctcccacctctccagaacaggctatcctaggtgagagtggaggtatgcagagtgctgccagtcacctggtttcccaagatggagggatgataacgatgcacagtccaaagagatcggggaagattcctccaaaactccacaatcatatggtccatcgagtctggaaggaatgcatcctcaacagaacccagtccaagaggagccaaatgtcaactccaactcttgaagaagagcctgctagcaatcctgctacttgggattttgtggatccaacccaaagagtcagctgttcttgttccaggcataagcttttaaaacgttgtgcagtcgggcccaatcgacctcccacagtatctcaaccagggttcagtgcaggaccatcatcatcttcatctttaccacctcctgcttcttctaagcacaaaacagcagaaagacaggaaaaaggagacaagctgcaaaagagacccttaataccatttcaccataggccctctgtggccgaagaattatgcatggagcaagatacaccaggacagaaactagggttggcagggatagactcctccttagaggtgtctagcagtaggaaatatgataagcaaatggccgtgccttccagaaatacaagcaagcaaatgaatctgaatcctatggattcacctcattcccctatatcccctctgccaccaacactcagccctcagccacgaggtcaggaaacagagagtttggacccaccatcggtccctgtgaatccagccctttatggaaatggactagaactccagcagttgtctactctggatgacagaactgtcctcgtaggccaaagactgcctctcatggcagaggtcagcgagacagccttatattgtgggattaggccctcgaacccggagtcatcagaaaagtggtggcatagttatcgtctcccacccagtgatgatgctgagttcaggcctccagagctccagggtgagagatgtgatgccaaaatggaggtaaactcagagagcactgcattgcaaagactcttagcacaacctaacaaacggtttaaaatctggcaagacaaacagccccagttgcagccactccacttccttgacccattgcctctatcacaacaacctggagacagtttgggagaagtgaatgacccatatacctttgaagatggtgacataaaatacatctttacagccaacaagaaatgcaaacaagggacggagaaagattccctgaaaaagaataagtcagaggatggatttggtaccaaggatgtcactacaccaggtcattccacgccggtgcctgatgggaaaaatgccatgtctattttcagttctgctactaaaacagatgtccggcaggataatgctgctggcagagctggctccagtagccttacacaggtaacagatttggcaccttccctgcatgacttagacaacatctttgataattctgatgacgacgaacttggggctgtatcacctgctctgcgctcatcaaaaatgcctgcagttgggacagaagaccgacctcttgggaaggatggaagagctgctgttccttatccaccaacagttgcagacttgcaaaggatgtttcccactccaccatctttggaacagcatcctgcattttctcctgtgatgaattataaagatgggatcagctcagagacagtgacagcattaggcatgatggagagccctatggtcagtatggtttcaacacaactcacagaattcaaaatggaagtggaagatggattaggaagtcccaagcccgaggaaattaaggacttttcatatgtgcacaaagttccatcctttcaaccttttgtgggatcctccatgtttgctccactgaagatgttgccgagccattgtttgctacctctgaagatacctgatgcctgtctgtttcggccttcatgggcaattcctcctaaaattgaacaactgcccatgccccctgcagccactttcattagagatggctacaataacgtgcctagtgttgggagcctagcagatccagactatctgaacacaccacagatgaacacacccgtgacgttgaacagcgctgccccagccagcaatagtggggcaggagtcctaccatctccagcaacccctcgcttctctgtccccacaccacgaacccccaggaccccaagaactcccagaggtgggggcactgccagtggtcaagggtctgttaagtatgatagcaccgatcaaggatcaccagcctccaccccctctactacacggcccctcaactctgtggagcccgccaccatgcagccaattcccgaagcccacagcctctatgttaccctgattctctccgattccgtgatgaatatctttaaagacagaaactttgacagctgttgcatctgtgcctgcaacatgaacatcaaaggggcggatgtcgggctttacatccccgattcttccaatgaggaccagtaccgctgtacctgtgggtttagtgcgattatgaaccgcaaacttggctacaattcaggactcttccttgaagatgagttggatatttttgggaagaattctgatattggtcaggctgcagagaggcgcttaatgatgtgtcagtccaccttccttcctcaggtggaaggaaccaaaaaaccccaggagccacccataagccttctcctcctcctccagaatcaacacacacaaccttttgcttcactgaatttcctggactacatttcctctaacaatcgccaaactcttccctgtgtaagctggagttatgaccgggtgcaagcagataataatgattactggacggaatgctttaatgcgttggagcaggggcggcagtatgtggataaccccactggtggaaaagtggacgaagctctggtgagaagtgccactgtgcactcttggcctcacagcaatgtgctggacatcagcatgctctcctcccaggatgtggttcgtatgctgttgtccctgcagccctttctccaagatgccatccaaaagaagcgcacgggcaggacctgggagaacatccagcatgtgcagggaccactcacttggcagcagttccataaaatggcaggacggggaacctacggttcggaagaatctcctgagccgttgcccatccccactctgctggtaggctatgacaaggatttcctcaccatctcgccattctccttgccgttttgggagaggctcttgttggacccatatgggggccaccgtgatgttgcctatattgtggtgtgtccagaaaatgaggccttgctcgaaggagccaaaactttcttcagggacttgagtgctgtatacgagatgtgtaggcttgggcagcacaagcccatctgcaaagtgctacgtgacgggatcatgcgcgtgggaaaaactgtggcacagaagctgacagatgagcttgtgagtgagtggtttaaccagccttggagcggcgaggagaatgacaatcattccagactcaaactttatgcgcaagtttgccgccatcacctagcaccttatttagccactctgcagcttgatagcagcctattgataccacctaaataccagaccccaccagcagcagcacagggacaagctacgccagggaatgctgggcccttagctccaaatggatcagcagctcccccagctggcagtgcatttaatcccacctcgaatagtagttctacaaatcctgcagcaagtagttctgcatctggttcctctgtgccaccggtctcatcgtctgcctctgctcctggtattagccagataagcactacctcttcttcaggattcagtggtagtgttggagggcagaaccccagcactgggggcatttctgcggatagaacgcaagggaacataggctgtggtggagacactgaccctgggcagagctcttctcagccctcacaggatggacaagagagtgttacagaaagggagagaataggaattcccacggagcctgactctgcagacagccatgcccaccctccagctgttgtcatttacatggtggacccgttcacgtatgctgcagaggaggactccacttctgggaacttttggctgttgagcttgatgcgctgctacacagaaatgctggataatttacctgagcatatgagaaattctttcattctccagattgtgccttgccagtacatgctgcagacaatgaaggatgagcaagttttctacattcaatacttgaagtccatggcattttcagtgtactgccagtgcaggcgaccactgcctacacagatccacattaaatccctcacgggatttgggcctgcagccagcattgagatgaccctcaagaaccctgagcggcccagcccaatccagctttactcccctccctttatattggccccaatcaaagacaagcagacagagctgggagagacgtttggtgaggcgagccagaaatacaatgtgctcttcgtgggctattgtctgtctcacgaccagcgctggcttttggcttcctgcactgacctccatggggaattattagagacctgcgttgtaaatattgctttaccaaacaggtcacggaggagtaaagtatctgcacgtaaaattggactacagaagttatgggagtggtgcatagggattgtccaaatgacatctctaccctggagagttgtaatcgggcgacttgggcgtcttggccatggggagcttaaagattggagtatcctccttggagaatgttcactacagacaatcagcaaaaagctcaaggatgtgtgccggatgtgtggaatctctgccgcagactctccttctatccttagtgcctgcctggttgccatggagccccaggggtcctttgtagtgatgccagatgctgtcacaatgggctctgtttttggccgaagtactgcactgaacatgcagtcatctcagctcaacacccctcaagatgcttcttgtacacacatcttggtgttcccaacatcatcaaccatccaggtggctccagccaactaccccaatgaagatgggtttagccccaacaatgatgatatgtttgttgaccttccattcccagatgatatggacaatgatattggcatattaatgactgggaacctccattcctctcccaactcttccccagtaccctccccaggctctccttctggaattggtgtgggctctcacttccagcatagtcggagccagggtgagcgtcttctttctagagaagcaccagaggagctaaagcagcagcccctggcccttgggtattttgtatcaactgccaaagctgagaatcttccccagtggttttggtcatcgtgtccccaggctcaaaaccagtgccctctcttcttaaaggcttcgctgcatcaccacatttcagtagcacagacagacgaacttctgcctgccaggaattctcagcgggttccacaccctcttgactccaaaaccacgtcggatgttttaaggtttgttttggagcagtacaacgctctgtcctggctcacgtgcaatccggccacccaggaccgtacttcctgccttcccgtccactttgtggtgctcactcagttgtacaatgccatcatgaatatactttaattggaaaagcacttgttctctctggctcagttccttctccctgcaacctcagtccaaggaacctgctacactctgcaaataacccacatccttttcttcagaccactctccacagtcctgcactgtgattccttctcagcaggcacatgtcaattctgcagtgttcattaccagagtgactccttgacacttctctcatggacctggaaacttccataagtggtgactttcagccagtgcggtggtgtgtgtagccccaaccactggtccccaggaagtggtggtggttgatggcttttcagcgggaaacagaagagacagtgtccttttgcacaagagtctgtgttttcagcctctgtatacaattgagggcagtctagccctttggatgaaatcctcttagttactggtgtatggcctgtgggttacctgaactccataatcggggactttttaaaaataagaaccagctcaagtacatggtttcatactggggtttctgtctccctagtgttcccatccagattagcatgagtgctttggttgacttcaaacctgtgtgtcaatgcagaaggtctggagacagcttcattttgtttatttattttaatttgttttgtcatatggtttttgtgactttatttttttaattcacaaggaccaggtacagtagctgaaacccaattcagatccaccataggattctttgactacatacctctgtcctagaagccggaaaaggagtaaaaacacattggggagatcatgcctaaaagtaatatattcaaaaccacccagcagtaggttttgttaacaacaaactggattttaaaagttctgccatgttaagtggccagcatttcatgaaggataacatttttatacagaaggcagtcaagctcaactcagagccatggaggcaagtaccttaattagttttatatagtcacaacggaaatatattttctagtgaattcttattggaagccaggtctctcctctcattagatcaaaagggacttatgtacatacaacaattgaaagtgtttgctcatgaaatcagttataaatatggtgaattttttctggaccataggaatattatttcaaagaaatattacaacttaaccattaaattagtacttgaagttgagcctttgtggtgggactttttaaaaaaatgcctttttaaagcattaatggctaattgaagtattttatgactcctcattcctggcccagagggttgtctttgaaaccctgtttctaacccttgtgttgtgtgtttctgtctgaggacagtgggtgtgtactggcctcccgggagccactgtgaccaggcctttgagctcttgtcatctgtggagagaatcatgcaaattttaaaagttcttccaagagacttccatgtcctggttattaacaaaaaaggaaaaatgtaataattgatatgattttgtaaaagtatttttcttgaaataatctaaagtttaaaacattatattaaaaaaaaaagttgtgtggtgggaatgtgaaagcagagaaataacttgtaaatggataattttgttctctgtaccaccagttgaagggggggttgactttcgcaatgtataggataaaaaatctgatatatcaaaccatttgtatctaatgtgtacagtgtaaaattgactttaaaaatattgcagtgctattttttcttaatcagaaaggaaaattctcaaggccttttgaagagcataagaagatgaagattgtaaacttgtataaaattatcttggtgagaagacaaattgtaaagtagatatttgtaatcttttaccactttggggttgcttttttcccggaattcatcagaactttgaattttttttttaaatgggctgtttttaatgcaggggcttttcttccctagaaacccaattctaagcagaaaaagaaaaaaaacacaaaaaataaaaaacccctacaaaaaaactttaaaaaaaatggcagcaaagggtagttttcatctggtgtcttttatttaagttttttaagttaagaaaagctggtgacatatttatacgtttttgtgcaaaaataaatgaatggcaatagattttaaaaaatcttattatgtacttctgtgtgaaaaagtctgtataatatttcccttaaatatgcattattttacttgtgagttttttactgaattaatctgaaatgtacaagccctggatttgctacagagtgagaagttattttatttttttttatttttaattttggaaattctgcagaaatcagaactcttaccatggtttgaacaaaaaaaggggaaatggggaggggaaaagggtgggattgtccagcatgcttgtatgtatatttcagaaccttttttaaatgtaaaagctgtacatttctgggaagttctgaatttcttttgtttccttttttccttcaagcattttgcagtgagcttcttttatatatagcaaacaatttgaaagaatacaaaaatatgtgaagttcatttaaaaaaataactacagtatagcgctggtacagtacactaaaagactttgataaaaagaaacaataataaaaggcctccattttaaatgtcattcatatataccttgtggatgagagctatatacttttacacacttttttagaggaataaattattgaattactgaaaaaaaaaaaaaaaaa

SEQ ID NO: 1667 - protein, 1908 aa, Homo sapien
GHIAVGQQGLGSVKDPSNCGMPLTPPTSPEQAILGESGGMQSAASHLVSQDGGMITMHSPKRSGKIPPKLHNHMVHRVWKECILNRTQSKRSQMSTPTLEEEPASNPATWDFVDPTQRVSCSCSRHKLLKRCAVGPNRPPTVSQPGFSAGPSSSSSLPPPASSKHKTAERQEKGDKLQKRPLIPFHHRPSVAEELCMEQDTPGQKLGLAGIDSSLEVSSSRKYDKQMAVPSRNTSKQMNLNPMDSPHSPISPLPPTLSPQPRGQETESLDPPSVPVNPALYGNGLELQQLSTLDDRTVLVGQRLPLMAEVSETALYCGIRPSNPESSEKWWHSYRLPPSDDAEFRPPELQGERCDAKMEVNSESTALQRLLAQPNKRFKIWQDKQPQLQPLHFLDPLPLSQQPGDSLGEVNDPYTFEDGDIKYIFTANKKCKQGTEKDSLKKNKSEDGFGTKDVTTPGHSTPVPDGKNAMSIFSSATKTDVRQDNAAGRAGSSSLTQVTDLAPSLHDLDNIFDNSDDDELGAVSPALRSSKMPAVGTEDRPLGKDGRAAVPYPPTVADLQRMFPTPPSLEQHPAFSPVMNYKDGISSETVTALGMMESPMVSMVSTQLTEFKMEVEDGLGSPKPEEIKDFSYVHKVPSFQPFVGSSMFAPLKMLPSHCLLPLKIPDACLFRPSWAIPPKIEQLPMPPAATFIRDGYNNVPSVGSLADPDYLNTPQMNTPVTLNSAAPASNSGAGVLPSPATPRFSVPTPRTPRTPRTPRGGGTASGQGSVKYDSTDQGSPASTPSTTRPLNSVEPATMQPIPEAHSLYVTLILSDSVMNIFKDRNFDSCCICACNMNIKGADVGLYIPDSSNEDQYRCTCGFSAIMNRKLGYNSGLFLEDELDIFGKNSDIGQAAERRLMMCQSTFLPQVEGTKKPQEPPISLLLLLQNQHTQPFASLNFLDYISSNNRQTLPCVSWSYDRVQADNNDYWTECFNALEQGRQYVDNPTGGKVDEALVRSATVHSWPHSNVLDISMLSSQDVVRMLLSLQPFLQDAIQKKRTGRTWENIQHVQGPLTWQQFHKMAGRGTYGSEESPEPLPIPTLLVGYDKDFLTISPFSLPFWERLLLDPYGGHRDVAYIVVCPENEALLEGAKTFFRDLSAVYEMCRLGQHKPICKVLRDGIMRVGKTVAQKLTDELVSEWFNQPWSGEENDNHSRLKLYAQVCRHHLAPYLATLQLDSSLLIPPKYQTPPAAAQGQATPGNAGPLAPNGSAAPPAGSAFNPTSNSSSTNPAASSSASGSSVPPVSSSASAPGISQISTTSSSGFSGSVGGQNPSTGGISADRTQGNIGCGGDTDPGQSSSQPSQDGQESVTERERIGIPTEPDSADSHAHPPAVVIYMVDPFTYAAEEDSTSGNFWLLSLMRCYTEMLDNLPEHMRNSFILQIVPCQYMLQTMKDEQVFYIQYLKSMAFSVYCQCRRPLPTQIHIKSLTGFGPAASIEMTLKNPERPSPIQLYSPPFILAPIKDKQTELGETFGEASQKYNVLFVGYCLSHDQRWLLASCTDLHGELLETCVVNIALPNRSRRSKVSARKIGLQKLWEWCIGIVQMTSLPWRVVIGRLGRLGHGELKDWSILLGECSLQTISKKLKDVCRMCGISAADSPSILSACLVAMEPQGSFVVMPDAVTMGSVFGRSTALNMQSSQLNTPQDASCTHILVFPTSSTIQVAPANYPNEDGFSPNNDDMFVDLPFPDDMDNDIGILMTGNLHSSPNSSPVPSPGSPSGIGVGSHFQHSRSQGERLLSREAPEELKQQPLALGYFVSTAKAENLPQWFWSSCPQAQNQCPLFLKASLHHHISVAQTDELLPARNSQRVPHPLDSKTTSDVLRFVLEQYNALSWLTCNPATQDRTSCLPVHFVVLTQLYNAIMNIL

SEQ ID NO: 1668 - DNA, 4018 bp, Homo sapien
gaagaagtcccgggcggtacccggccgtaggcccatcctgcaactctctccgccgggtcctcggggcagcacgccgggccgggacccggagccggaacccgacactgagccggactcaaccgcggcggtccccagccagcccgccccgtcggcggcgacgaccaccgcggtgactgccgccgcggcctcggacgactcgccttcagaagatgaacaggaagcggtgcaggaggttcctagagttgttcagaatcctccaaaaccagtcatgaccactagacccacagctgttaaagcaacaggcggtctatgcttgcttggtgcttatgctgacagtgatgacgatgacaatgatgtttccgaaaaactagcacaatccaaagagacaaatggaaaccagtcaactgatattgatagtacattggccaacttcctagcggagatcgatgccataacagctcctcagcctgcagctcctgtaggagcttctgctccacctccaactccacctcgaccagagccaaaggaagcagcaacatctaccctttcttcttctacttcaaatggaacagactccacccaaacatctggttggcaatatgatactcagtgttcactggcaggagtcggaattgagatgggcgattggcaggaagtctgggatgagaacacgggatgttattattattggaatacacaaacaaatgaagtgacttgggagttaccccaatatcttgccacacaggtacagggattacagcattaccagcccagttctgtgccaggtgctgaaactagttttgtggtaaatacagacatatattctaaggagaaaacgatttctgtttccagtagtaaaagtggaccagtcatagccaagcgagaagttaaaaaggaagtaaatgaaggaattcaggctctctcaaatagtgaggaggagaagaaaggggtggcagcatcgctgcttgctcctttattgcctgagggaataaaagaagaagaagagagatggagaagaaaagtaatttgtaaagaggagccagtttcagaagtaaaagaaacaagtacaacagtagaagaagcaacaacaatagtaaagccacaggaaattatgttggacaatatagaagacccttctcaggaggatctttgcagtgttgtccaatctggagaaagtgaggaggaagaggaacaagatacccttgaactggagctagttttggaaaggaaaaaagcagagttgcgagccttggaggaaggagatggtagtgtgtcagggtctagtccacgttctgatatcagccagccagcatctcaagatggaatgcgtaggcttatgtctaaaagaggaaaatggaagatgtttgttcgagctaccagtccagaatctaccagtaggagttctagtaaaactggacgagatactccagaaaatggagaaactgcaattggtgctgaaaattcagaaaaaatagatgagaattcagataaagagatggaagtagaagaatctccagagaaaataaaagtacagacaacaccaaaagtagaagaagaacaggatttgaaatttcagattggagaactggcaaataccctgacaagtaaattcgagtttctaggcattaatagacaatccatctccaactttcatgtgctgctcttacagactgagactcgaattgcagactggcgggaaggggctcttaatggaaactaccttaaacgaaaacttcaggatgcagcagaacaactaaaacagtatgaaataaacgccactcctaaaggctggtcctgccactgggacagggatcatagacggtatttctatgtaaacgaacagtcgggcgagtctcagtgggagtttccagatggtgaagaggaagaagaagaaagccaagcacaagaaaatagagatgagactcttgccaaacagaccttgaaagacaaaactggcactgattcaaattcaacagaatcctctgaaacttccacaggttctctttgtaaagaatccttttctggtcaagtttcttcttcatcactcatgccacttactccattctggaccctccttcagtcaaatgttcctgtgcttcaacctccattacccttggaaatgccaccacccccacctccacctccagaatcacctccaccccctcctccaccacctcctcctgcggaagatggtgagatccaggaggtagagatggaggatgagggaagtgaggagccccctgccccaggaacagaggaagatacccctttgaaaccttcagcacaaaccacagttgtaactagccagagttcagttgattccaccatctctagttcttcttccactaaaggaataaagaggaaagctacagaaattagcactgcagtggttcagaggtcagctaccattggcagttctccagttctctatagccagtcagctatagctacaggtcaccaggcagcagggattggaaaccaggcaacaggaattggacatcagacaataccagttagccttccagcagcaggaatgggtcatcaggccagaggaatgagcctgcagtcaaattaccttggactagcggcagcacctgcaattatgagttatgcagaatgttctgtcccaattggagtgactgctccctcattgcagccagttcaggcccgaggtgctgtgcctaccgctaccattatagaaccaccaccaccacctcctcctcctcctcctccaccaccaccagctcccaaaatgccaccacctgaaaagacaaaaaaaggaaggaaagacaaggcaaagaagagtaagaccaaaatgccatctttggtaaaaaagtggcagagtatccagcgtgagttagatgaagaggacaattctagttccagtgaagaggatcgggaatcaactgcacagaagcgaattgaagagtggaaacagcagcagctggttagtggcatggcagagagaaatgctaattttgaagcccttcctgaggattggagagcaaggctgaagagaaggaaaatggctccaaacacatagtttttaagtttttaaaacttttttgtattattgtttgttttgtgttcagttcaaagtcttaaccagttttattgtcaaataaactataaatgttatgggggagatcttataaatttcctgggcaagagtgtatgcatacaaagttttcacttttgtgaaatgtaatttttctgtttttgcaaagggatgaggtgattggaattgctttgaccatgctgcctttattctcaaactggcaaacttagcatgttaggtgtattaacctcatcagtcttgaagaacatgtggctcatgagtataacacttctgtagaggactccctgacaaaagtgaagaattaacttctcctccagaacaagtgcaattcagaaggcagctctgcattctaccttgcttgactggaattgtctgaagctttttctggcctcttttctctagtcggccacccctgaagtgctgaggtctaagtggtttacctcgtgctgatagatggccacactctttagagtagttctcataagttctagaactggtagctcggtcgtttcgcacactaggtggcatacaggcagcagcaggtgttcatatccttgattttgagaatttcccctcaagtatgtggcagtaaatacaacaagacactctatgtattaatgtctccattgtcttaaccctgttccaaaacaaaattcacctcctttctttatgtgaatgtattctccataaaattccagtatttaaaaagcagtttactgttctgtactttctgttgtatcacaatcaggtaaaagtcactttaaactgaggaaacggcaaattgtgttttaaagctctttgtatttctccagtttctgaccttgtaaatttgtatatatgcactaataaagctttttttataaaaaaaaaaaaaaaaaaaaaaaaaaaaaaaaaaaaaaaaaaaaaaaaaaaaaaaaaaaaaaaaaaaaaaaaaaaaaa

SEQ ID NO: 1669 - protein, 1013 aa, Homo sapien
KKSRAVPGRRPILQLSPPGPRGSTPGRDPEPEPDTEPDSTAAVPSQPAPSAATTTAVTAAAASDDSPSEDEQEAVQEVPRVVQNPPKPVMTTRPTAVKATGGLCLLGAYADSDDDDNDVSEKLAQSKETNGNQSTDIDSTLANFLAEIDAITAPQPAAPVGASAPPPTPPRPEPKEAATSTLSSSTSNGTDSTQTSGWQYDTQCSLAGVGIEMGDWQEVWDENTGCYYYWNTQTNEVTWELPQYLATQVQGLQHYQPSSVPGAETSFVVNTDIYSKEKTISVSSSKSGPVIAKREVKKEVNEGIQALSNSEEEKKGVAASLLAPLLPEGIKEEEERWRRKVICKEEPVSEVKETSTTVEEATTIVKPQEIMLDNIEDPSQEDLCSVVQSGESEEEEEQDTLELELVLERKKAELRALEEGDGSVSGSSPRSDISQPASQDGMRRLMSKRGKWKMFVRATSPESTSRSSSKTGRDTPENGETAIGAENSEKIDENSDKEMEVEESPEKIKVQTTPKVEEEQDLKFQIGELANTLTSKFEFLGINRQSISNFHVLLLQTETRIADWREGALNGNYLKRKLQDAAEQLKQYEINATPKGWSCHWDRDHRRYFYVNEQSGESQWEFPDGEEEEEESQAQENRDETLAKQTLKDKTGTDSNSTESSETSTGSLCKESFSGQVSSSSLMPLTPFWTLLQSNVPVLQPPLPLEMPPPPPPPPESPPPPPPPPPPAEDGEIQEVEMEDEGSEEPPAPGTEEDTPLKPSAQTTVVTSQSSVDSTISSSSSTKGIKRKATEISTAVVQRSATIGSSPVLYSQSAIATGHQAAGIGNQATGIGHQTIPVSLPAAGMGHQARGMSLQSNYLGLAAAPAIMSYAECSVPIGVTAPSLQPVQARGAVPTATIIEPPPPPPPPPPPPPPAPKMPPPEKTKKGRKDKAKKSKTKMPSLVKKWQSIQRELDEEDNSSSSEEDRESTAQKRIEEWKQQQLVSGMAERNANFEALPEDWRARLKRRKMAPNT

SEQ ID NO: 1670 - DNA, 572 bp, Homo sapien
tttccttgtccaataaggtatttaatattcacttagggactattagatgtcccatttctcttctctttcatttctcttatctcttctcaccccagtgtaacgaatcgctacaggtttttaccaaaatgctgcagcagtagttggaaatgagttattttgcattactaaagtgttcaatcacattatcacgggtcacatttgtatataaccaggagatggccaaataacatctactgcagtgattttgcaaattcagcatagtcaatgtatccatcattgttcttggcatcatctctcaaaacaccatctattatgttaatcagttcatcttcactcattagtggtgcctgttcactcccttcctccttatggacatgagtgatggctgtggagagttctaagccatcaagcaaattattgccatcataatcatgcattttgaagtaatggagctgcaattcttgtggcgacatctccgcctctggtttgttgatgacaccttctagatgctccatgatatgctcttggtcgtgcactgtgttcttatccaggcccatgctgccgggttggga

SEQ ID NO: 1671 - DNA, 3637 bp, Homo sapien
gggaactccttcctcagcctctcgtcagcgccgcttctcctggtttctcttgcagatgctgctgctaggggtggtgggagcagccgtgggacgcgtggccgggagcgggggtgacagcctgggattccgggggcttctcttccttgtcctcctcctctcctctctattcccagtgtggccgtggctgacactaaagactttgtagccatcaacccgagtgcagtttcgatggaaaatgaaggttgcacgttttcaaaaaatacctaatggtgaaaatgagacaatgattcctgtattgacatcaaaaaaagcaagtgaattaccagtcagtgaagttgcaagcattctccaagctgatcttcagaatggtctaaacaaatgtgaagttagtcataggcgagcctttcatggctggaataagtttgatattagtgaagatgagccactgtggaagaagtatatttctcagtttaaaaatccccttattatgctgcttctggcttctgcagtcatcagtgttttaatgcatcagtttgatgatgccgtcagtatcactgtggcaatacttatcgttgttacagttgcctttgttcaggaatatcgttcagaaaaatctcttgaagaattgagtaaacttgtgccaccagaatgccattgtgtgcgtgaaggaaaattggagcatacacttgcccgagacttggttccaggtgatacagtttgcctttctgttggggatagagttcctgctgacttacgcttgtttgaggctgtggatctttccattgatgagtccagcttgacaggtgagacaacgccttgttctaaggtgacagctcctcagccagctgcaactaatggagatcttgcatcgagaagtaacattgcctttatgggaacactggtcagatgtggcaaagcaaagggtgttgtcattggaacaggagaaaattctgaatttggggaggtttttaaaatgatgcaagcagaagaggcaccaaaaacccctctgcagaagagcatggacctcttaggaaaacaactttccttttactcctttggtataataggaatcatcatgttggttggctggttactgggaaaagatatcctggaaatgtttactattagtgtaagtttggctgtagcagcaattcctgaaggtctccccattgtggtcacagtgacgctagctcttggtgttatgagaatggtgaagaaaagggccattgtgaaaaagctgcctattgttgaaactctgggctgctgtaatgtgatttgttcagataaaactggaacactgacgaagaatgaaatgactgttactcacatatttacttcagatggtctgcatactgaggttactggagttggctataatcaatttggggaagtgattgttgatggtgatgttgttcatggattctataacccagctgttagcagaattgttgaggcgggctgtgtgtgcaatgatgctgtaattagaaacaatactctaatggggaagccaacagaaggggccttaattgctcttgcaatgaagatgggtcttgatggacttcaacaagactacatcagaaaagctgaatacccttttagctctgagcaaaagtggatggctgttaagtgtgtacaccgaacacagcaggacagaccagagatttgttttatgaaaggtgcttacgaacaagtaattaagtactgtactacataccagagcaaagggcagaccttgacacttactcagcagcagagagatgtgtaccaacaagagaaggcacgcatgggctcagcgggactcagagttcttgctttggcttctggtcctgaactgggacagctgacatttcttggcttggtgggaatcattgatccacctagaactggtgtgaaagaagctgttacaacactcattgcctcaggagtatcaataaaaatgattactggagattcacaggagactgcagttgcaatcgccagtcgtctgggattgtattccaaaacttcccagtcagtctcaggagaagaaatagatgcaatggatgttcagcagctttcacaaatagtaccaaaggttgcagtattttacagagctagcccaaggcacaagatgaaaattattaagtcgctacagaagaacggttcagttgtagccatgacaggagatggagtaaatgatgcagttgctctgaaggctgcagacattggagttgcgatgggccagactggtacagatgtttgcaaagaggcagcagacatgatcctagtggatgatgattttcaaaccataatgtctgcaatcgaagagggtaaagggatttataataacattaaaaatttcgttagattccagctgagcacgagtatagcagcattaactttaatctcattggctacattaatgaactttcctaatcctctcaatgccatgcagattttgtggatcaatattattatggatggacccccagctcagagccttggagtagaaccagtggataaagatgtcattcgtaaacctcctcgcaactggaaagacagcattttgactaaaaacttgatacttaaaatacttgtttcatcaataatcattgtttgtgggactttgtttgtcttctggcgtgagctacgagacaatgtgattacacctcgagacacaacaatgaccttcacatgctttgtgttttttgacatgttcaatgcactaagttccagatcccagaccaagtctgtgtttgagattggactctgcagtaatagaatgttttgctatgcagttcttggatccatcatgggacaattactagttatttactttcctccgcttcagaaggtttttcagactgagagcctaagcatactggatctgttgtttcttttgggtctcacctcatcagtgtgcatagtggcagaaattataaagaaggttgaaaggagcagggaaaagatccagaagcatgttagttcgacatcatcatcttttcttgaagtatgatgcatattgcattattttatttgcaaactaggaattgcagtctgaggatcatttagaagggcaagttcaagaggatatgaagatttgagaactttttaactattcattgactaaaaatgaacattaatgttaaagacttaagactttaacctgctggcagtcccaaatgaaattatgcaactttgatatcatattccttgatttaaattggcttttgtgattgagtgaaactttataaagcatatggtcagttatttaattaaaaaggcaaaacctgaaccaccttctgcacttaaagaagtctaacagtacaaatacactatctatcttagatagatatatttttttttatttttaaatattgtactatttatggtggtggggctttcttactaatacacaaataaatttaatcatttcaaaggcattctatttggtttagaagttgattcccaggagtgccatatttcagctactgtatttcctttttcttgtaatgtaagcagctcagataccatgtgctatcatttttgtatcaagttttttgcacaggatgtgaccactgtcagatcactgttcttttctttctttttgtgattgaaaagcctatactacaatttgaagtaaatttttgtttttctt

SEQ ID NO: 1672 - protein, 919 aa, Homo sapien
MKVARFQKIPNGENETMIPVLTSKKASELPVSEVASILQADLQNGLNKCEVSHRRAFHGWNKFDISEDEPLWKKYISQFKNPLIMLLLASAVISVLMHQFDDAVSITVAILIVVTVAFVQEYRSEKSLEELSKLVPPECHCVREGKLEHTLARDLVPGDTVCLSVGDRVPADLRLFEAVDLSIDESSLTGETTPCSKVTAPQPAATNGDLASRSNIAFMGTLVRCGKAKGVVIGTGENSEFGEVFKMMQAEEAPKTPLQKSMDLLGKQLSFYSFGIIGIIMLVGWLLGKDILEMFTISVSLAVAAIPEGLPIVVTVTLALGVMRMVKKRAIVKKLPIVETLGCCNVICSDKTGTLTKNEMTVTHIFTSDGLHTEVTGVGYNQFGEVIVDGDVVHGFYNPAVSRIVEAGCVCNDAVIRNNTLMGKPTEGALIALAMKMGLDGLQQDYIRKAEYPFSSEQKWMAVKCVHRTQQDRPEICFMKGAYEQVIKYCTTYQSKGQTLTLTQQQRDVYQQEKARMGSAGLRVLALASGPELGQLTFLGLVGIIDPPRTGVKEAVTTLIASGVSIKMITGDSQETAVAIASRLGLYSKTSQSVSGEEIDAMDVQQLSQIVPKVAVFYRASPRHKMKIIKSLQKNGSVVAMTGDGVNDAVALKAADIGVAMGQTGTDVCKEAADMILVDDDFQTIMSAIEEGKGIYNNIKNFVRFQLSTSIAALTLISLATLMNFPNPLNAMQILWINIIMDGPPAQSLGVEPVDKDVIRKPPRNWKDSILTKNLILKILVSSIIIVCGTLFVFWRELRDNVITPRDTTMTFTCFVFFDMFNALSSRSQTKSVFEIGLCSNRMFCYAVLGSIMGQLLVIYFPPLQKVFQTESLSILDLLFLLGLTSSVCIVAEIIKKVERSREKIQKHVSSTSSSFLEV

SEQ ID NO: 1673 - DNA, 1310 bp, Homo sapien
gctcggagcccggagcgtgcctcggcggcctgtcggttttcaccatggagcagctgagctcagcaaacacccgcttcgccttggacctgttcctggcgttgagtgagaacaatccggctggaaacatcttcatctctcccttcagcatttcatctgctatggccatggtttttctggggaccagaggtaacacggcagcacagctgtccaagactttccatttcaacacggttgaagaggttcattcaagattccagagtctgaatgctgatatcaacaaacgtggagcgtcttatattctgaaacttgctaatagattatatggagagaaaacttacaatttccttcctgagttcttggtttcgactcagaaaacatatggtgctgacctggccagtgtggattttcagcatgcctctgaagatgcaaggaagaccataaaccagtgggtcaaaggacagacagaaggaaaaattccggaactgttggcttcgggcatggttgataacatgaccaaacttgtgctagtaaatgccatctatttcaagggaaactggaaggataaattcatgaaagaagccacgacgaatgcaccattcagattgaataagaaagacagaaaaactgtgaaaatgatgtatcagaagaaaaaatttgcatatggctacatcgaggaccttaagtgccgtgtgctggaactgccttaccaaggcgaggagctcagcatggtcatcctgctgccggatgacattgaggacgagtccacgggcctgaagaagattgaggaacagttgactttggaaaagttgcatgagtggactaaacctgagaatctcgatttcattgaagttaatgtcagcttgcccaggttcaaactggaagagagttacactctcaactccgacctcgcccgcctaggtgtgcaggatctctttaacagtagcaaggctgatctgtctggcatgtcaggagccagagatatttttatatcaaaaattgtccacaagtcatttgtggaagtgaatgaagagggaacagaggcggcagctgccacagcaggcatcgcaactttctgcatgttgatgcccgaagaaaatttcactgccgaccatccattccttttctttattcggcataattcctcaggtagcatcctattcttggggagattttcttccccttagaagaaagagactgtagcaatacaaaaatcaagcttagtgctttattacctgagtttttaatagagccaatatgtcttatatctttaccaataaaaccactgtccagaaaaaaaaaaaaaaaaaaaa

SEQ ID NO: 1674 - protein, 379 aa, Homo sapien
MEQLSSANTRFALDLFLALSENNPAGNIFISPFSISSAMAMVFLGTRGNTAAQLSKTFHFNTVEEVHSRFQSLNADINKRGASYILKLANRLYGEKTYNFLPEFLVSTQKTYGADLASVDFQHASEDARKTINQWVKGQTEGKIPELLASGMVDNMTKLVLVNAIYFKGNWKDKFMKEATTNAPFRLNKKDRKTVKMMYQKKKFAYGYIEDLKCRVLELPYQGEELSMVILLPDDIEDESTGLKKIEEQLTLEKLHEWTKPENLDFIEVNVSLPRFKLEESYTLNSDLARLGVQDLFNSSKADLSGMSGARDIFISKIVHKSFVEVNEEGTEAAAATAGIATFCMLMPEENFTADHPFLFFIRHNSSGSILFLGRFSSP

SEQ ID NO: 1675 - DNA, 7032 bp, Homo sapien
gccgcgtgcgtcctgcccggagccggcgggacatgcccggagcgcgcgctggagcggcgcgaggaggaggcgaacgtggtgctcaccgggacggtggaggagatcctcaacgtggacccggtgcagcacacgtactcctgcaaggttcgggtctggcggtacttgaagggcaaagacctggtggcccgggagagcctgctggacggcggcaacaaggtggtgatcagcggctttggagaccccctcatctgtgacaaccaggtgtccactggggacaccaggatcttctttgtgaaccctgcacccccatacctgtggccagcccacaagaacgagctgatgctcaactccagcctcatgcggatcaccctgcggaacctggaggaggtggagttctgtgtggaagataaacccgggacccacttcactccagtgcctccgacgcctcctgatgcgtgccggggaatgctgtgcggcttcggcgccgtgtgcgagcccaacgcggaggggccgggccgggcgtcctgcgtctgcaagaagagcccgtgccccagcgtggtggcgcctgtgtgtgggtcggacgcctccacctacagcaacgaatgcgagctgcagcgggcgcagtgcagccagcagcgccgcatccgcctgctcagccgcgggccgtgcggctcgcgggacccctgctccaacgtgacctgcagcttcggcagcacctgtgcgcgctcggccgacgggctgacggcctcgtgcctgtgccccgcgacctgccgtggcgcccccgaggggaccgtctgcggcagcgacggcgccgactaccccggcgagtgccagctcctgcgccgcgcctgcgcccgccaggagaatgtcttcaagaagttcgacggcccttgtgacccctgtcagggcgccctccctgacccgagccgcagctgccgtgtgaacccgcgcacgcggcgccctgagatgcgcctacggcccgagagctgccctgcccggcaggcgccagtgtgtggggacgacggagtcacctacgaaaacgactgtgtcatgggccgatcgggggccgcccggggtctcctcctgcagaaagtgcgctccggccagtgccagggtcgagaccagtgcccggagccctgccggttcaatgccgtgtgcctgtcccgccgtggccgtccccgctgctcctgcgaccgcgtcacctgtgacggggcctacaggcccgtgtgtgcccaggacgggcgcacgtatgacagtgattgctggcggcagcaggctgagtgccggcagcagcgtgccatccccagcaagcaccagggcccgtgtgaccaggccccgtccccatgcctcggggtgcagtgtgcatttggggcgacgtgtgctgtgaagaacgggcaggcagcgtgtgaatgcctgcaggcgtgctcgagcctctacgatcctgtgtgcggcagcgacggcgtcacatacggcagcgcgtgcgagctggaggccacggcctgtaccctcgggcgggagatccaggtggcgcgcaaaggaccctgtgaccgctgcgggcagtgccgctttggagccctgtgcgaggccgagaccgggcgctgcgtgtgcccctctgaatgcgtggctttggcccagcccgtgtgtggctccgacgggcacacgtaccccagcgagtgcatgctgcacgtgcacgcctgcacacaccagatcagcctgcacgtggcctcagctggaccctgcgagacctgtggagatgccgtgtgtgcttttggggctgtgtgctccgcagggcagtgtgtgtgtccccggtgtgagcaccccccgcccggccccgtgtgtggcagcgacggtgtcacctacggcagtgcctgcgagctacgggaagccgcctgcctccagcagacacagatcgaggaggcccgggcagggccgtgcgagcaggccgagtgcggttccggaggctctggctctggggaggacggtgactgtgagcaggagctgtgccggcagcgcggtggcatctgggacgaggactcggaggacgggccgtgtgtctgtgacttcagctgccagagtgtcccaggcagcccggtgtgcggctcagatggggtcacctacagcaccgagtgtgagctgaagaaggccaggtgtgagtcacagcgagggctctacgtagcggcccagggagcctgccgaggccccaccttcgccccgctgccgcctgtggcccccttacactgtgcccagacgccctacggctgctgccaggacaatatcaccgcagcccggggcgtgggcctggctggctgccccagtgcctgccagtgcaacccccatggctcttacggcggcacctgtgacccagccacaggccagtgctcctgccgcccaggtgtggggggcctcaggtgtgaccgctgtgagcctggcttctggaactttcgaggcatcgtcaccgatggccggagtggctgtacaccctgcagctgtgatccccaaggcgccgtgcgggatgactgtgagcagatgacggggctgtgctcgtgtaagcccggggtggctggacccaagtgtgggcagtgtccagacggccgtgccctgggccccgcgggctgtgaagctgacgcttctgcgcctgcgacctgtgcggagatgcgctgtgagttcggtgcgcggtgcgtggaggagtctggctcagcccactgtgtctgcccgatgctcacctgtccagaggccaacgctaccaaggtctgtgggtcagatggagtcacatacggcaacgagtgtcagctgaagaccatcgcctgccgccagggcctgcaaatctctatccagagcctgggcccgtgccaggaggctgttgctcccagcactcacccgacatctgcctccgtgactgtgaccaccccagggctcctcctgagccaggcactgccggccccccccggcgccctccccctggctcccagcagtaccgcacacagccagaccacccctccgccctcatcgcgacctcggaccactgccagcgtccccaggaccaccgtgtggcccgtgctgacggtgccccccacggcaccctcccctgcacccagcctggtggcgtccgcctttggtgaatctggcagcactgatggaagcagcgatgaggaactgagcggggaccaggaggccagtgggggtggctctggggggctcgagcccttggagggcagcagcgtggccacccctgggccacctgtcgagagggcttcctgctacaactccgcgttgggctgctgctctgatgggaagacgccctcgctggacgcagagggctccaactgccccgccaccaaggtgttccagggcgtcctggagctggagggcgtcgagggccaggagctgttctacacgcccgagatggctgaccccaagtcagaactgttcggggagacagccaggagcattgagagcaccctggacgacctcttccggaattcagacgtcaagaaggatttccggagtgtccgcttgcgggacctggggcccggcaaatccgtccgcgccattgtggatgtgcactttgaccccaccacagccttcagggcacccgacgtggcccgggccctgctccggcagatccaggtgtccaggcgccggtccttgggggtgaggcggccgctgcaggagcacgtgcgatttatggactttgactggtttcctgcgtttatcacgggggccacgtcaggagccattgctgcgggagccacggccagagccaccactgcatcgcgcctgccgtcctctgctgtgacccctcgggccccgcaccccagtcacacaagccagcccgttgccaagaccacggcagcccccaccacacgtcggccccccaccactgcccccagccgtgtgcccggacgtcggcccccggccccccagcagcctccaaagccctgtgactcacagccctgcttccacggggggacctgccaggactgggcattgggcgggggcttcacctgcagctgcccggcaggcaggggaggcgccgtctgtgagaaggtgcttggcgcccctgtgccggccttcgagggccgctccttcctggccttccccaccctccgcgcctaccacacgctgcgcctggcactggaattccgggcgctggagcctcaggggctgctgctgtacaatggcaacgcccggggcaaggacttcctggcattggcgctgctagatggccgcgtgcagctcaggtttgacacaggttcggggccggcggtgctgaccagtgccgtgccggtagagccgggccagtggcaccgcctggagctgtcccggcactggcgccggggcaccctctcggtggatggtgagacccctgttctgggcgagagtcccagtggcaccgacggcctcaacctggacacagacctctttgtgggcggcgtacccgaggaccaggctgccgtggcgctggagcggaccttcgtgggcgccggcctgagggggtgcatccgtttgctggacgtcaacaaccagcgcctggagcttggcattgggccgggggctgccacccgaggctctggcgtgggcgagtgcggggaccacccctgcctgcccaacccctgccatggcggggccccatgccagaacctggaggctggaaggttccattgccagtgcccgcccggccgcgtcggaccaacctgtgccgatgagaagagcccctgccagcccaacccctgccatggggcggcgccctgccgtgtgctgcccgagggtggtgctcagtgcgagtgccccctggggcgtgagggcaccttctgccagacagcctcggggcaggacggctctgggcccttcctggctgacttcaacggcttctcccacctggagctgagaggcctgcacacctttgcacgggacctgggggagaagatggcgctggaggtcgtgttcctggcacgaggccccagcggcctcctgctctacaacgggcagaagacggacggcaagggggacttcgtgtcgctggcactgcgggaccgccgcctggagttccgctacgacctgggcaagggggcagcggtcatcaggagcagggagccagtcaccctgggagcctggaccagggtctcactggagcgaaacggccgcaagggtgccctgcgtgtgggcgacggcccccgtgtgttgggggagtccccggttccgcacaccgtcctcaacctgaaggagccgctctacgtagggggcgctcccgacttcagcaagctggcccgtgctgctgccgtgtcctctggcttcgacggtgccatccagctggtctccctcggaggccgccagctgctgaccccggagcacgtgctgcggcaggtggacgtcacgtcctttgcaggtcacccctgcacccgggcctcaggccacccctgcctcaatggggcctcctgcgtcccgagggaggctgcctatgtgtgcctgtgtcccgggggattctcaggaccgcactgcgagaaggggctggtggagaagtcagcgggggacgtggataccttggcctttgacgggcggacctttgtcgagtacctcaacgctgtgaccgagagcgagaaggcactgcagagcaaccactttgaactgagcctgcgcactgaggccacgcaggggctggtgctctggagtggcaaggccacggagcgggcagactatgtggcactggccattgtggacgggcacctgcaactgagctacaacctgggctcccagcccgtggtgctgcgttccaccgtgcccgtcaacaccaaccgctggttgcgggtcgtggcacatagggagcagagggaaggttccctgcaggtgggcaatgaggcccctgtgaccggctcctccccgctgggcgccacgcagctggacactgatggagccctgtggcttgggggcctgccggagctgcccgtgggcccagcactgcccaaggcctacggcacaggctttgtgggctgcttgcgggatgtggtggtgggccggcacccgctgcacctgctggaggacgccgtcaccaagccagagctgcggccctgccccaccccatgagctggcaccagagccccgcgcccgctgtaattattttctatttttgtaaacttgttgctttttgatatgattttcttgcctgagtgttggccggagggactgctggcccggcctcccttccgtccaggcagccgtgctgcagacagacctagtgctgagggatggacaggcgaggtggcagcgtggagggctcggcgtggatggcagcctcaggacacacacccctgcctcaaggtgctgagcccccgccttgcactgcgcctgccccacggtgtccccgccgggaagcagccccggctcctgaatcaccctcgctccgtcaggcgggactcgtgtcccaaaaaggaaggggctgctgaggtctgatggggcccttcctccgggtgaccccacagggcctttccaagcccctatttgagctgctccttcctgtgtgtgctctggaccctgcctcggcctcctgcgccaatactgtgacttccaaacaatgttactgctgggcacagctctgcgttgctcccgtgctgcctgcgccagccccaggctgctgaggagcagaggccagaccagggccgatctgggtgtcctgaccctcagctggccctgcccagccaccctggacatgaccgtatccctctgccacaccccaggccctgcgaggggctatcgagaggagctcactgtgggatggggttgacctctgccgcctgcctgggtatctgggcctggccatggctgtgttcttcatgtgttgattttatttgacccctggagtggtgggtctcatctttcccatctcgcctgagagcggctgagggctgcctcactgcaaatcctccccacagcgtcagtgaaagtcgtccttgtctcagaatgaccaggggccagccagtgtctgaccaaggtcaaggggcaggtgcagaggtggcagggatggctccgaagccagaa

SEQ ID NO: 1676 - protein, 2000 aa, Homo sapien
AACVLPGAGGTCPERALERREEEANVVLTGTVEEILNVDPVQHTYSCKVRVWRYLKGKDLVARESLLDGGNKVVISGFGDPLICDNQVSTGDTRIFFVNPAPPYLWPAHKNELMLNSSLMRITLRNLEEVEFCVEDKPGTHFTPVPPTPPDACRGMLCGFGAVCEPNAEGPGRASCVCKKSPCPSVVAPVCGSDASTYSNECELQRAQCSQQRRIRLLSRGPCGSRDPCSNVTCSFGSTCARSADGLTASCLCPATCRGAPEGTVCGSDGADYPGECQLLRRACARQENVFKKFDGPCDPCQGALPDPSRSCRVNPRTRRPEMRLRPESCPARQAPVCGDDGVTYENDCVMGRSGAARGLLLQKVRSGQCQGRDQCPEPCRFNAVCLSRRGRPRCSCDRVTCDGAYRPVCAQDGRTYDSDCWRQQAECRQQRAIPSKHQGPCDQAPSPCLGVQCAFGATCAVKNGQAACECLQACSSLYDPVCGSDGVTYGSACELEATACTLGREIQVARKGPCDRCGQCRFGALCEAETGRCVCPSECVALAQPVCGSDGHTYPSECMLHVHACTHQISLHVASAGPCETCGDAVCAFGAVCSAGQCVCPRCEHPPPGPVCGSDGVTYGSACELREAACLQQTQIEEARAGPCEQAECGSGGSGSGEDGDCEQELCRQRGGIWDEDSEDGPCVCDFSCQSVPGSPVCGSDGVTYSTECELKKARCESQRGLYVAAQGACRGPTFAPLPPVAPLHCAQTPYGCCQDNITAARGVGLAGCPSACQCNPHGSYGGTCDPATGQCSCRPGVGGLRCDRCEPGFWNFRGIVTDGRSGCTPCSCDPQGAVRDDCEQMTGLCSCKPGVAGPKCGQCPDGRALGPAGCEADASAPATCAEMRCEFGARCVEESGSAHCVCPMLTCPEANATKVCGSDGVTYGNECQLKTIACRQGLQISIQSLGPCQEAVAPSTHPTSASVTVTTPGLLLSQALPAPPGALPLAPSSTAHSQTTPPPSSRPRTTASVPRTTVWPVLTVPPTAPSPAPSLVASAFGESGSTDGSSDEELSGDQEASGGGSGGLEPLEGSSVATPGPPVERASCYNSALGCCSDGKTPSLDAEGSNCPATKVFQGVLELEGVEGQELFYTPEMADPKSELFGETARSIESTLDDLFRNSDVKKDFRSVRLRDLGPGKSVRAIVDVHFDPTTAFRAPDVARALLRQIQVSRRRSLGVRRPLQEHVRFMDFDWFPAFITGATSGAIAAGATARATTASRLPSSAVTPRAPHPSHTSQPVAKTTAAPTTRRPPTTAPSRVPGRRPPAPQQPPKPCDSQPCFHGGTCQDWALGGGFTCSCPAGRGGAVCEKVLGAPVPAFEGRSFLAFPTLRAYHTLRLALEFRALEPQGLLLYNGNARGKDFLALALLDGRVQLRFDTGSGPAVLTSAVPVEPGQWHRLELSRHWRRGTLSVDGETPVLGESPSGTDGLNLDTDLFVGGVPEDQAAVALERTFVGAGLRGCIRLLDVNNQRLELGIGPGAATRGSGVGECGDHPCLPNPCHGGAPCQNLEAGRFHCQCPPGRVGPTCADEKSPCQPNPCHGAAPCRVLPEGGAQCECPLGREGTFCQTASGQDGSGPFLADFNGFSHLELRGLHTFARDLGEKMALEVVFLARGPSGLLLYNGQKTDGKGDFVSLALRDRRLEFRYDLGKGAAVIRSREPVTLGAWTRVSLERNGRKGALRVGDGPRVLGESPVPHTVLNLKEPLYVGGAPDFSKLARAAAVSSGFDGAIQLVSLGGRQLLTPEHVLRQVDVTSFAGHPCTRASGHPCLNGASCVPREAAYVCLCPGGFSGPHCEKGLVEKSAGDVDTLAFDGRTFVEYLNAVTESEKALQSNHFELSLRTEATQGLVLWSGKATERADYVALAIVDGHLQLSYNLGSQPVVLRSTVPVNTNRWLRVVAHREQREGSLQVGNEAPVTGSSPLGATQLDTDGALWLGGLPELPVGPALPKAYGTGFVGCLRD

SEQ ID NO: 1677 - DNA, 2190 bp, Homo sapien
ggcttacaggagggcagctctgcagttgggaggggcaccgtccggaggagaccaggcctctacacaccccccactctacttatcatccctgctcacacacccttgtccaaggctttatgcatcggatttatttttccaaatcaagaggacagtgatagatgcattttccccaggctgtctcagaaaggtcgctaaatgtatactgttgtcagaattgctgagatctccccccacttttggtttttgcagcagtaaaaactctttccactgtgacttattttctctctcaggcagccagccacctggtcccttgtgctgactctagcacagtggccaggatccaatacgagtccaggggtgaccgcaggatggtgggggcagcgggcttctccacctaccccagccaccaaggccctgacgcactgcctcctgcaccttcagcacatccctgtgcacagctggaagggtgcatggcccgctcacctttgttcagatgggtggaaacgctgatgataccagctcctccctgccgtgcccctgccacggagcaggcattgtgaactggctggtgtttgcagtcccacgtggcatggcctccagcccaacccacagtggagactggagacagggcaatgagtctggtcgggggcacgtggacatgccccataggggccccacccagacttaacaggcaaggtcctgggcattgcgcgacgcaggactcaatgctaaagcaagcctgcctggctctgtgccagggcccctcttctgatttacacatcccatttttacacagacccttccttcttaataaaggctgacagttctgttggcagccaagaacccacaccatgaagacagggagtgaggggcctttgtgcccaactccagcacagctgcgttctggggtgtgtgagaggcatgttcgtgtctgtgcgctggtggtctcgtgagacagttccgaggacggggaaattgcagggtggtgggggcgtgaggcttatatgtggaactgatgcagagttcgcctgcagacggatctggatatacactatgtataattgttacgtgtaatttaaaatatatctgtttgccatcgtcatgagaagattatatgtaaggctctgaagggagagggagatgtacattctgccaggctcctggggaccttatccgagtcatgaaattgatgactgttgatccagtggtgcaagaagctacactccatgtgtcatcacgcttatgactcctaatgtatttttaaggcaaaaaatgtcagccgactccatcttcacccctcgattcctcgagtccagcctttctgtgccagtgcttcactgagccacaacgctctcgccatcgggacccggctgggcctggagtctcggggcacagttgccatggagccctcctgggtcattctacaaatgtgctgagtgccagctgaaaaccccacaggagatggagtaccttggccaagcttaaagagaagattttctcagggtatttattagtgtgtccagcagggtcaggaagcaggatggaaagatgcattcagactgttaatttattaacaaggcaaatgattttgtgtttcttgatgacagactattaagtttgggacttattttcccatttgagaagttataatatatatttaagatgataagtttcctgcttaagttgtgcctttcagcttcaatgagtttaaggagcactaagggtaatgataccaatgagggttggtttattatcaaacctgaatagctgtggtttctccagtaaatattttcttctactgaacatggagccattattaagagttgtgtgttttttattatgtacatttgtatatttttttgcttgtttgatgttctatttttctaatagttttcttttagtttcttaaagttgtgatactagatttagattctgatgctaactgcaaatcaggttggtctctgctgggtctctcctgcttttattttactttaaggacaagtgtagttgtcgtccaccacctttcaaaaaatgtgaaactgccctgcctcccctttttgctgacaacactgtgtacattgaccacttcctaccatactttatgttgtaaaatcaaactcttttgtggtacattatctcatgcttctgcaaattcgaataaattctatggcttccaaaaaaaaaaaaaaa

SEQ ID NO: 1678 - protein, 21 aa, Homo sapien
MKLMTVDPVVQEATLHVSSRL

SEQ ID NO: 1679 - DNA, 1132 bp, Homo sapien
gcgtcaccacagaggcaagacaagggtccatatcgcggcatccggctcccgcccgtcttcaggagagaaagaaaaaataaaatatacttggggaagttgtacctgccagaattagtaagagctttctttaagaagacatttgtcaaactcaacaaattgaaggttaacaccttaagagttgtagttactgaccagaaatatggacagacttcttagacttggaggaggtatgcctggactgggccaggggccacctacagatgctcctgcagtggacacagcagaacaagtctatatctcttccctggcactgttaaaaatgttaaaacatggccgtgctggagttccaatggaagttatgggtttgatgcttggagaatttgttgatgattataccgtcagagtgattgatgtgtttgctatgccacagtcaggaacaggtgtcagtgtggaggcagttgatccagtgttccaagctaaaatgttggatatgttgaagcagacaggaaggccggagatggttgttggttggtatcacagtcaccctggctttggttgttggctttctggtgtggatatcaacactcagcagagctttgaagccttgtcggagagagctgtggcagtggttgtggatcccattcagagtgtaaaaggaaaggttgttattgatgccttcagattgatcaatgctaatatgatggtcttaggacatgaaccaagacaaacaacttcgaatctgggtcacttaaacaagccatctatccaggcattaattcatggactaaacagacattattactccattactattaactatcggaaaaatgaactggaacagaagatgttgctaaatttgcataagaagagttggatggaaggtttgacacttcaggactacagtgaacattgtaaacacaatgaatcagtggtaaaagagatgttggaattagccaagaattacaataaggctgtagaagaagaagataagatgacacctgaacagctggcaataaagaatgttggcaagcaggaccccaaacgtcatttggaggaacatgtggatgtacttatgacctcaaatattgtccagtgtttagcagctatgttggatactgtcgtatttaaataa

SEQ ID NO: 1680 - protein, 310 aa, Homo sapien
MDRLLRLGGGMPGLGQGPPTDAPAVDTAEQVYISSLALLKMLKHGRAGVPMEVMGLMLGEFVDDYTVRVIDVFAMPQSGTGVSVEAVDPVFQAKMLDMLKQTGRPEMVVGWYHSHPGFGCWLSGVDINTQQSFEALSERAVAVVVDPIQSVKGKVVIDAFRLINANMMVLGHEPRQTTSNLGHLNKPSIQALIHGLNRHYYSITINYRKNELEQKMLLNLHKKSWMEGLTLQDYSEHCKHNESVVKEMLELAKNYNKAVEEEDKMTPEQLAIKNVGKQDPKRHLEEHVDVLMTSNIVQCLAAMLDTVVFK

SEQ ID NO: 1681 - DNA, 5226 bp, Homo sapien
aaaatacttgccctttggaaaaaaatcattctggcgtccacattcagactggtttagaggagagtaatactgaagacatgcccccccgaatcaaggtagcaattgcggagatgaaaagaaatgagtccaaaagatgcttaaatgtgaccattgaacaggatttgactcattggatatgaggccatggagcagtgtctggctaggtggatggatgttggtgctgtttagttaaataggaaactggaagagaagcaggcttgcaagaatggtaatattttggacgtgtaacttgtctggcaagatgttgaagaggtaaaggaggcagcacagcatcatgggccttggaggcagaagccgctttgatttactcagaacaccaaatcagtctccattttcttgactcagactacacccaagagattgcttccttccctgtgcttcctggccacttgctactctagctaggaagatctgcctcccttagctgaagtctaagatgtgtagcttattgatgcctctcctcttcttgttctgctgttgctgaatataatggggatgccagggcagacataccattcaacttgaatcttccttacccactttgtatagtcttacatgtcattgataccttgttttctggtacgcctaaaaggagtagaacttcaagtggtatttaaaagctttaagaaaagtcaaatttttacttttttcttcccatctgaggcatggatttattttctttttaaagaaatccaaatttttaaaagaagggatcttatttttaaaacgaagatcgataatatctactatgtactaaatgtcattctttaaaagttgttccctcataatttagtaaattacttccttttttaaaaaaaggaaagaaagagtgtttgtcttacaggctaacatcacaaacaataagtttcttctcatccatctccatttataaactagtgtgactgtcttctgagcacagtattaaacctggacagggagagggagggtgttagagaatgagagggaaagagagagaatacctacatataaggtgaccctaaagaaaagcctttcacccttcggaagatcttttcattttcatttttcttttttcaaacaccaacttgtaccagagggaagatctttttttaaaagcgtttcactaaaatttgtaaggaaataatgagctagataaaatattacagtgtttatttaatgaatttactcatatttaaaataatatctaaaaagagtaatttaggaatattgaggcaatgagacttgaaggttataaatagtggcagtgagaaaaggaatattatagataagctgttgaaaagaaaagatgctaagttttctagtgcttccttctgtttccaagggattatagaaatcggagtttgtttgacctgtttcacaggcatctcctttgtggactcattgtgtctcttccttaggctaatagtcaccatttatcatggacggttgtcatgagtgttgaagcacacttaacctgcttcgtcagagggtacttggcatcaccggtgcacagctggtgtcctagcaggagactaactagctgacacaccgtgctttgttagcctaataatcttatttgttaaaacttgccatttgttggatttttctattttaccccattataaacttcttattgagatcagatgacttctgaatagcatttgctgtatttttccaaggtaaagaatatctttttcagatttttctttctttctttaatgtcagaaatagaagaaatcttttctaccgaccttgtgccaggagatgtcatggtcattccattaaatgggacaataatgccttgtgatgctgtgcttattaatggtacctgcattgtaaacgaaagcatgttaacaggagaaagtgttccagtgacaaagactaatttgccaaatccttcagtggatgtgaaaggaataggagatcaattatataatccggaaacacataaacgacatactttgttttgtgggacaactgttattcagactcgtttctacactggagaactcgtcaaagccatagttgttagaacaggatttagtacttccaaaggacagcttgttcgttccatattgtatcccaaaccaactgattttaaactctacagagatgcctacttgtttctactatgtcttgtggcagttgctggcattgggtttatctacactattattaatagcattttaaatgaggtacaagttggggtcataattatcgagtctcttgatattatcacaattactgtgccccctgcacttcctgctgcaatgactgctggtattgtgtatgctcagagaagactgaaaaaaatcggtattttctgtatcagtcctcaaagaataaatatttgtggacagctcaatcttgtttgctttgacaagactggaactctaactgaagatggtttagatctttgggggattcaacgagtggaaaatgcacgatttctttcaccagaagaaaatgtgtgcaatgagatgttggtaaaatcccagtttgttgcttgtatggctacttgtcattcacttacaaaaattgaaggagtgctctctggtgatccacttgatctgaaaatgtttgaggctattggatggattctggaagaagcaactgaagaagaaacagcacttcataatcgaattatgcccacagtggttcgtcctcccaaacaactgcttcctgaatctacccctgcaggaaaccaagaaatggagctgtttgaacttccagctacttatgagataggaattgttcgccagttcccattttcttctgctttgcaacgtatgagtgtggttgccagggtgctgggggataggaaaatggacgcctacatgaaaggagcgcccgaggccattgccggtctctgtaaacctgaaacagttcctgtcgattttcaaaacgttttggaagacttcactaaacagggcttccgtgtgattgctcttgcacacagaaaattggagtcaaaactgacatggcataaagtacagaatattagcagagatgcaattgagaacaacatggattttatgggattaattataatgcagaacaaattaaagcaagaaccccctgcagtacttgaagatttgcataaagccaacattcgcaccgtcatggtcacaggtgacagtatgttgactgctgtctctgtggccagagattgtggaatgattctacctcaggataaagtgattattgctgaagcattacctccaaaggatgggaaagttgccaaaataaattggcattatgcagactccctcacgcagtgcagtcatccatcagcaattgacccagaggctattccggttaaattggtccatgatagcttagaggatcttcaaatgactcgttatcattttgcaatgaatggaaaatcattctcagtgatactggagcattttcaagaccttgttcctaagttgatgttgcatggcaccgtgtttgcccgtatggcacctgatcagaagacacagttgatagaagcattgcaaaatgttgattattttgttgggatgtgtggtgatggcgcaaatgattgtggtgctttgaagagggcacacggaggcatttccttatcggagctcgaagcttcagtggcatctccctttacctctaagactcctagtatttcctgtgtgccaaaccttatcagggaaggccgtgctgctttaataacttcctcctgtgaattagcactattttctatagttacttattctctggatcattttataatttccatattaatttcaagtatgctcgtgttattcttcagtgatttccacaattgtgcattttattctttggtttaagtactgaagcatataatgaaagtaattgctaagtagcagcttaaaaattcaattatccgattgtatttaacatctttaagagcatgatcataaagagctatttttgacaccccccccccacttttttaacatttagagttagtaagggttttatatctcttctgtccatattgttttcaaaggaatgaggtgtttaggtggctggaaaagcatttgtaggaagttagatttgaatatagacaaggtgggttattcacgttgagaatgttatttgaagaatgcctgtgaagccaggtgtgggttctactcagtgccatagatagactgagtcttctctcgtaggttaccattacatagtaattttgattctgaatttcacattaaattatttgagtttatacagacctaaattttaaaatctgtacatatattattttgatgtattaagatgaatattgctgatttaaattttatttatgcacatacttaaaggacagaaatgtctgggaaagtaattgttaaataatgatatgtaactttttaactttttaaataaataacaagatttttaatgtgtgtctccctcagggttgtttaaagttttttttctccctcaagtataaatagtggtaactatatgttttgtatcttctagcaccaactgctgtaaagcaatgctgcaaataatgcttgaatacaagtggctaagccaacaacagaataaatacttttatagtagttttataatcctgaaattcgaaagctttcccaattgcacttgcatctaaacaaaactgttgcagtttttactctatttattttgttccccatgtttatgaaagtcctgcacagtttcaaaggcatggtaaataatatatcaatgtttatgtagtctgttacagaaacagctatagataacattatccagtgaagagcaaaattcaagctttagaaaatattcatgcatgcaattttgacatatctaaaaataggtttttgtatatttatggtgggaggtggttgggaacttttaacaaaatggggtgttaatttttgtacagtctgtgggcatttacacatttttaatgtattaaaatttggtaattatgtgtacattaaattaataaaagttacttctagttatgatttgtgaattccctaagaccttggatttttttaagtaactttatatcagaaatgatactgcatctttatatttttaaaattgtattgctgctcaagaatggtaccctcttgtcaaaaaggcatacattcataattgtacattcagcattgtaaataatcttatgaaaccttttttgattgaagctattcaaaataaaaattttaatgaatgaaataa

SEQ ID NO: 1682 - protein, 701 aa, Homo sapien
MSEIEEIFSTDLVPGDVMVIPLNGTIMPCDAVLINGTCIVNESMLTGESVPVTKTNLPNPSVDVKGIGDQLYNPETHKRHTLFCGTTVIQTRFYTGELVKAIVVRTGFSTSKGQLVRSILYPKPTDFKLYRDAYLFLLCLVAVAGIGFIYTIINSILNEVQVGVIIIESLDIITITVPPALPAAMTAGIVYAQRRLKKIGIFCISPQRINICGQLNLVCFDKTGTLTEDGLDLWGIQRVENARFLSPEENVCNEMLVKSQFVACMATCHSLTKIEGVLSGDPLDLKMFEAIGWILEEATEEETALHNRIMPTVVRPPKQLLPESTPAGNQEMELFELPATYEIGIVRQFPFSSALQRMSVVARVLGDRKMDAYMKGAPEAIAGLCKPETVPVDFQNVLEDFTKQGFRVIALAHRKLESKLTWHKVQNISRDAIENNMDFMGLIIMQNKLKQEPPAVLEDLHKANIRTVMVTGDSMLTAVSVARDCGMILPQDKVIIAEALPPKDGKVAKINWHYADSLTQCSHPSAIDPEAIPVKLVHDSLEDLQMTRYHFAMNGKSFSVILEHFQDLVPKLMLHGTVFARMAPDQKTQLIEALQNVDYFVGMCGDGANDCGALKRAHGGISLSELEASVASPFTSKTPSISCVPNLIREGRAALITSSCELALFSIVTYSLDHFIISILISSMLVLFFSDFHNCAFYSLV

SEQ ID NO: 1683 - DNA, 5507 bp, Homo sapien
aacacttactaaatggaataagtttgcaccggttaattaaatatcttttttgtaagtattcacagttcatggcccgggcagtggctcctggaagaggaacaagtgtgggaaaagggagaggaagccggagctaaatgacaggatgcaggcgacttgagacacaaaaagagaagcgttcctctcggatccaggcattgcctcgctgctttcttttctccaagacgggctgaggattgtacagctctaggcggagttggggctcttcggatcgcttagattctcctctttgctgcatttccccccacgtcctcgttctcccgcgtctgcctgcggacccggagaagggagaatggagagggggctgccgctcctctgcgccgtgctcgccctcgtcctcgccccggccggcgcttttcgcaacgataaatgtggcgatactataaaaattgaaagccccgggtaccttacatctcctggttatcctcattcttatcacccaagtgaaaaatgcgaatggctgattcaggctccggacccataccagagaattatgatcaacttcaaccctcacttcgatttggaggacagagactgcaagtatgactacgtggaagtcttcgatggagaaaatgaaaatggacattttaggggaaagttctgtggaaagatagcccctcctcctgttgtgtcttcagggccatttctttttatcaaatttgtctctgactacgaaacacatggtgcaggattttccatacgttatgaaattttcaagagaggtcctgaatgttcccagaactacacaacacctagtggagtgataaagtcccccggattccctgaaaaatatcccaacagccttgaatgcacttatattgtctttgcgccaaagatgtcagagattatcctggaatttgaaagctttgacctggagcctgactcaaatcctccaggggggatgttctgtcgctacgaccggctagaaatctgggatggattccctgatgttggccctcacattgggcgttactgtggacagaaaacaccaggtcgaatccgatcctcatcgggcattctctccatggttttttacaccgacagcgcgatagcaaaagaaggtttctcagcaaactacagtgtcttgcagagcagtgtctcagaagatttcaaatgtatggaagctctgggcatggaatcaggagaaattcattctgaccagatcacagcttcttcccagtatagcaccaactggtctgcagagcgctcccgcctgaactaccctgagaatgggtggactcccggagaggattcctaccgagagtggatacaggtagacttgggccttctgcgctttgtcacggctgtcgggacacagggcgccatttcaaaagaaaccaagaagaaatattatgtcaagacttacaagatcgacgttagctccaacggggaagactggatcaccataaaagaaggaaacaaacctgttctctttcagggaaacaccaaccccacagatgttgtggttgcagtattccccaaaccactgataactcgatttgtccgaatcaagcctgcaacttgggaaactggcatatctatgagatttgaagtatacggttgcaagataacagattatccttgctctggaatgttgggtatggtgtctggacttatttctgactcccagatcacatcatccaaccaaggggacagaaactggatgcctgaaaacatccgcctggtaaccagtcgctctggctgggcacttccacccgcacctcattcctacatcaatgagtggctccaaatagacctgggggaggagaagatcgtgaggggcatcatcattcagggtgggaagcaccgagagaacaaggtgttcatgaggaagttcaagatcgggtacagcaacaacggctcggactggaagatgatcatggatgacagcaaacgcaaggcgaagtcttttgagggcaacaacaactatgatacacctgagctgcggacttttccagctctctccacgcgattcatcaggatctaccccgagagagccactcatggcggactggggctcagaatggagctgctgggctgtgaagtggaagcccctacagctggaccgaccactcccaacgggaacttggtggatgaatgtgatgacgaccaggccaactgccacagtggaacaggtgatgacttccagctcacaggtggcaccactgtgctggccacagaaaagcccacggtcatagacagcaccatacaatcagagtttccaacatatggttttaactgtgaatttggctggggctctcacaagaccttctgccactgggaacatgacaatcacgtgcagctcaagtggagtgtgttgaccagcaagacgggacccattcaggatcacacaggagatggcaacttcatctattcccaagctgacgaaaatcagaagggcaaagtggctcgcctggtgagccctgtggtttattcccagaactctgcccactgcatgaccttctggtatcacatgtctgggtcccacgtcggcacactcagggtcaaactgcgctaccagaagccagaggagtacgatcagctggtctggatggccattggacaccaaggtgaccactggaaggaagggcgtgtcttgctccacaagtctctgaaactttatcaggtgattttcgagggcgaaatcggaaaaggaaaccttggtgggattgctgtggatgacattagtattaataaccacatttcacaagaagattgtgcaaaaccagcagacctggataaaaagaacccagaaattaaaattgatgaaacagggagcacgccaggatacgaaggtgaaggagaaggtgacaagaacatctccaggaagccaggcaatgtgttgaagaccttagaccccatcctcatcaccatcatagccatgagtgccctgggggtcctcctgggggctgtctgtggggtcgtgctgtactgtgcctgttggcataatgggatgtcagaaagaaacttgtctgccctggagaactataactttgaacttgtggatggtgtgaagttgaaaaaagacaaactgaatacacagagtacttattcggaggcatgaaggcagacagagatgaaaagacagtcaaaggacggaagtggaaggacgggagtgagctggggagctgttgatctttcactatacaggctgggaagtgtgttgatgaccactgagccaggcttttctcaggagcttcaatgagtatggccgacagacatggacaaggagctgtgttcaccatcggactcatgtgcagtcagcttttttcctgttggtttcatttgaataatcagatgctggtgttgagaccaagtatgattgacataatcattcatttcgacccctcctgcccctctctctctctctcctctcccctttgtggattctttttggaaactgagcgaaatccaagatgctggcaccaagcgtattccgtgtggccctttggatggacatgctacctgaaacccagtgcccagaatatactagaatcaccgcatttcagtggactcctgaagttgtacttgtgtataattgcccgcgtcgtgcataggcaaagaaggattaggctgttttctttttaaagtactgtagcctcagtactggtgtagtgtgtcagctctgtttacgaagcaatactgtccagttttcttgctgtttttccggtgttgtactaaacctcgtgcttgtgaactccatacagaaaacggtgccatccctgaacacggctggccactgggtatactgctgacaaccgcaacaacaaaaacacaaatccttggcactggctagtctatgtcctctcaagtgcctttttgtttgtactggttcattgtgttacattaacgacccactctgcttcttgctggtgaaagccctgctctttaatcaaactctggtggcccactgactaagaagaaagtttattttcgtgtgagatgccagcccctccgggcaggcaagggctctgaagatttggcaacgtggcttaattgttctgctttttctgtagttcaatttcatgtttcttgacccttttgtataaagctacaatattctctcttattgttctttcatatggaatgtattttcaaatgtaaactctcttctctttctctctcctatctctctgtcttttttctctcttagaattggaggatttgccattgtccaggaaagaaacttgcagctttaacctgctgggaatggcaaacgattttactagactttatgtttaaaaataaataaataagggaaattcctaactttgccctccaaagtctaactttggttttcttgttaactggttaaagtgacagtatcttttttccttatctattctattcaaaatgacctttgatagaaatgttggcatttagtagaaatagtgataagttgaggaaagaaataatacaaattggctttcaagtgagacccaaaggaagaactggataaaatcttccaaatccaaaagcatgagatttttctatccaaatatgcaaaaatgacccaagagaactttcttattttgctactgagtcacacaagggaagtggaaggaagaacagttaatttaagaatgaaactataaatcctgatgcctgggggtcaagtattttaagataagagggggaaaaacacataaagtcaaacaaatgttttaaaaattcataacagcaaccttgaaaaaatagacttaaatgaatgcttctagaaacttccagcggctcacaaagaataagcctgccttagggctggcaacatctaagcctctaacagcacagggaagcaaatatcttaccaggcagcctatgaattaacccaaagaagctttggttggttttggtggatttttatcatgccatgttggacatgagattttttagatcttccttcccacattgctagacgtctcactcaaagacatttgttgggagtcacatttgcatcatagacgagacagtccattcatcttagttaaattggattgagaatgccttttgtttccaggaaaatattgatcaccatgaaagaagaatagttttttgtccccagagacattcatttagttgatataatcctaccagaaggaaagcactaagaaacactcgtttgttgtttttaaaggcaacagacttaaagttgtcctcagccaaggaaaaatgatactgcaactttaaaatttaaagtatcttgcactgataaatatatttaaaaattgtatgtttataaagttattaatttgtaaaggcagtgttacaaaatgttcagtttatattgttttagattgttttgtaatttttaaaggtgtaaaataacatattttttctttatggaaatctaaaactttctgtagtaaaatgttttcattttactggtatattattgcttcatgttttgtaccatcataagattttgtgcagatttttttttacagaaattatta

SEQ ID NO: 1684 - protein, 923 aa, Homo sapien
MERGLPLLCAVLALVLAPAGAFRNDKCGDTIKIESPGYLTSPGYPHSYHPSEKCEWLIQAPDPYQRIMINFNPHFDLEDRDCKYDYVEVFDGENENGHFRGKFCGKIAPPPVVSSGPFLFIKFVSDYETHGAGFSIRYEIFKRGPECSQNYTTPSGVIKSPGFPEKYPNSLECTYIVFAPKMSEIILEFESFDLEPDSNPPGGMFCRYDRLEIWDGFPDVGPHIGRYCGQKTPGRIRSSSGILSMVFYTDSAIAKEGFSANYSVLQSSVSEDFKCMEALGMESGEIHSDQITASSQYSTNWSAERSRLNYPENGWTPGEDSYREWIQVDLGLLRFVTAVGTQGAISKETKKKYYVKTYKIDVSSNGEDWITIKEGNKPVLFQGNTNPTDVVVAVFPKPLITRFVRIKPATWETGISMRFEVYGCKITDYPCSGMLGMVSGLISDSQITSSNQGDRNWMPENIRLVTSRSGWALPPAPHSYINEWLQIDLGEEKIVRGIIIQGGKHRENKVFMRKFKIGYSNNGSDWKMIMDDSKRKAKSFEGNNNYDTPELRTFPALSTRFIRIYPERATHGGLGLRMELLGCEVEAPTAGPTTPNGNLVDECDDDQANCHSGTGDDFQLTGGTTVLATEKPTVIDSTIQSEFPTYGFNCEFGWGSHKTFCHWEHDNHVQLKWSVLTSKTGPIQDHTGDGNFIYSQADENQKGKVARLVSPVVYSQNSAHCMTFWYHMSGSHVGTLRVKLRYQKPEEYDQLVWMAIGHQGDHWKEGRVLLHKSLKLYQVIFEGEIGKGNLGGIAVDDISINNHISQEDCAKPADLDKKNPEIKIDETGSTPGYEGEGEGDKNISRKPGNVLKTLDPILITIIAMSALGVLLGAVCGVVLYCACWHNGMSERNLSALENYNFELVDGVKLKKDKLNTQSTYSEA

SEQ ID NO: 1685 - DNA, 4086 bp, Homo sapien
atttatgctctcagccttgtgttgtcaatttggaagcagttgtttcatctgagttcagaagtagcattcccgtgtacaaaaaaaggtggaagaatgagaaacatcttcacaccagcaggacacaaatagtacatgtgaaatttccaagcattatggtttacagagatgattatttcatcagacattccatctctgtatctgcagtgatagtacgcgcctggattactcacaaatacagtggcagagactggaatgttaaatgggaggaaaacttgctccatgctgtagcaaagaattataccctcctgcagaccatcccgccttttgaacgccctttcaaagatcatcaagtgtgccttgagtggaacatgggttatatttggaaccttcgggcaaacaggattccacagtgtcctctggaaaatgatgtggttgccctgcttggctttccttatgcctccagtggagaaaacacaggcattgtcaagaagttcccgaggtttcggaaccgagagctggaggccactcgacgccagaggatggattacccagtgtttactgtttcattgtggctttatttactccattattgcaaggccaacctctgtgggattctgtactttgttgactctaatgagatgtacggcacaccttctgtatttcttacggaagagggctatttgcatattcagatgcatcttgtcaaaggggaagaccttgctgtaaaaactaaattcatcatacctttgaaggagtggtttcgactggatatctcttttaacggaggccagatagtagtaaccactagcattggacaggatttgaaaagctaccacaatcagaccattagcttccgggaggatttccattataatgacacagctgggtacttcattattggagggagcaggtatgtggctggcattgaagggttttttggacccctgaagtactatcgccttcgcagtctgcaccccgcccagatttttaatcccctccttgagaagcaacttgctgaacaaatcaagttatattatgaaaggtgtgctgaggttcaagaaatagtatctgtgtatgcatctgcagcaaagcacgggggcgagagacaagaagcatgccacctccacaactcctacctggacctccagcgcaggtatgggagaccctcgatgtgcagagccttcccctgggagaaggagctgaaagacaaacaccccagcttgttccaggcattgctggagatggatctgctgaccgtgccaaggaaccaaaatgaatctgtatcagaaatcggtgggaagatatttgagaaggctgtaaagagactctctagcattgatggtcttcaccaaattagctctatcgtcccctttctgacggattccagctgctgtggataccataaagcatcctactaccttgcagtcttttatgagactggattaaatgttcctcgggatcagctgcagggcatgttgtatagtttggttggaggccaggggagtgagaggctgtcttcaatgaatcttgggtataaacactaccagggtattgacaactaccccctggactgggaactgtcgtatgcctactacagcaacattgccaccaagacaccccttgaccagcacacactgcaaggagatcaggcatatgttgaaacaattagactaaaagatgatgaaatactcaaggtacaaaccaaagaagatggagatgtctttatgtggttgaagcatgaagctacccgaggcaatgcagcagctcagcaacgattggcccagatgctgttctgggggcagcaaggtgtggccaagaatcccgaagcagcaattgagtggtacgccaagggcgccctggagacggaggatcctgcgttaatctatgactatgccattgtgctattcaagggtcaaggagtaaaaaagaacagacggcttgccttagagctgatgaagaaagcagcttccaagggattgcatcaggcagtcaatggcctgggatggtattaccacaaattcaagaaaaattacgccaaagcagcaaagtactggttaaaagcagaagaaatggggaacccagatgcgtcatacaatcttggagtcctgcatttggatggcatcttccctggagttcctggaaggaatcaaactttagctggtgaatatttccataaggctgcgcaaggtggacacatggaagggaccttgtggtgttctctctactatatcacaggcaacctggagacattccctagagatcctgagaaagctgttgtatgggcaaaacatgtagctgagaaaaatggctacttgggccatgtcatccgcaaaggcctcaatgcctacctggaaggttcatggcatgaagctttgctgtattatgttttagcagcagaaactggaattgaagtgtcacagacaaatttagcacacatctgtgaggagaggccagacctggccaggagatacttgggtgttaactgtgtttggagatactataatttctctgtttttcaaatcgatgctccttcctttgcatatttgaagatgggagacctttactactatggccaccaaaaccagtcacaagacctggagttgtctgtgcagatgtacgcccaagccgccctggatggagactcccagggattttttaacctggccctgctaatcgaggaaggtacgataatcccacaccatatcttggatttcttggaaattgactcaactctccattctaataacatctccattctccaggaactgtacgaaaggtgctggagccacagtaacgaggagtccttcagcccctgctccttggcctggctttacctgcacttgcggcttctctggggtgctatcctgcactcagccctgatctactttctgggaacctttctgctatccatattgatcgcctggactgtgcagtatttccagtctgtctcagcaagcgatccccctccaagaccatcccaggcctccccagacactgccacgtccactgcaagtccagctgtgactccagctgcagatgcctctgaccaagaccagcccacagtaactaataacccggagccacgtgggtgaactgtgcactccagttctctccagatgagagagaatcttttcaacagctggtattgggaagctggggccagggcatgatcctgataaacaccttaaatgtcttgtcaactggatgcaaattttgcaattggtgtcattttttttaaagtcaaattacaaggaagtacccagatcaggcagtggtaataccaaaggtcatcaaacacatacaaggaacatcttgatcatagggcatgtggggaagtttactgggccatcacagacttttgttctagtgattgtatgtattaggagtcatagcatgccctacggcagatctggattcttatacactaagatgtgtcttaagaatcacagtgcgtgcttcatccctttattgaagaacagaaaattatgactactctacaaggtggataatattttggtacctgtgcttgccacagccctgttcctcaaagctgaattgatagatttctctttgacttccaagacctagcagttataaggcaccttgaaataaattgtttgtgcctggaaatgcagggagggcaatagctttgtaaattggtttacatttttctccttgaatttttctagggtcctagtgcttccgaatcatttaatggcattgtcggatatcttttacatttcaattgcaatccatgaaattacatttagaagattcttagtacttaactgtagtcttctccatgaattacacgttagaatagactggcagcaacggaatatgcagcaagtaagcctctagcttatagtttcatccctacccctcatgcctgcgtgagtctgtacagggatatgtgtgtgtgtgtgtgtgtgtgtgtgtgtgtgtgttagagaggaagaggaagagcagaatgtctgtatactacatgctgctaaggtagtgaataaatcagtaatgcaatattgtgggtccaaactactctttgcactactttatttacagtagtaaataaaattatttttatac

SEQ ID NO: 1686 - protein, 1029 aa, Homo sapien
LCSQPCVVNLEAVVSSEFRSSIPVYKKRWKNEKHLHTSRTQIVHVKFPSIMVYRDDYFIRHSISVSAVIVRAWITHKYSGRDWNVKWEENLLHAVAKNYTLLQTIPPFERPFKDHQVCLEWNMGYIWNLRANRIPQCPLENDVVALLGFPYASSGENTGIVKKFPRFRNRELEATRRQRMDYPVFTVSLWLYLLHYCKANLCGILYFVDSNEMYGTPSVFLTEEGYLHIQMHLVKGEDLAVKTKFIIPLKEWFRLDISFNGGQIVVTTSIGQDLKSYHNQTISFREDFHYNDTAGYFIIGGSRYVAGIEGFFGPLKYYRLRSLHPAQIFNPLLEKQLAEQIKLYYERCAEVQEIVSVYASAAKHGGERQEACHLHNSYLDLQRRYGRPSMCRAFPWEKELKDKHPSLFQALLEMDLLTVPRNQNESVSEIGGKIFEKAVKRLSSIDGLHQISSIVPFLTDSSCCGYHKASYYLAVFYETGLNVPRDQLQGMLYSLVGGQGSERLSSMNLGYKHYQGIDNYPLDWELSYAYYSNIATKTPLDQHTLQGDQAYVETIRLKDDEILKVQTKEDGDVFMWLKHEATRGNAAAQQRLAQMLFWGQQGVAKNPEAAIEWYAKGALETEDPALIYDYAIVLFKGQGVKKNRRLALELMKKAASKGLHQAVNGLGWYYHKFKKNYAKAAKYWLKAEEMGNPDASYNLGVLHLDGIFPGVPGRNQTLAGEYFHKAAQGGHMEGTLWCSLYYITGNLETFPRDPEKAVVWAKHVAEKNGYLGHVIRKGLNAYLEGSWHEALLYYVLAAETGIEVSQTNLAHICEERPDLARRYLGVNCVWRYYNFSVFQIDAPSFAYLKMGDLYYYGHQNQSQDLELSVQMYAQAALDGDSQGFFNLALLIEEGTIIPHHILDFLEIDSTLHSNNISILQELYERCWSHSNEESFSPCSLAWLYLHLRLLWGAILHSALIYFLGTFLLSILIAWTVQYFQSVSASDPPPRPSQASPDTATSTASPAVTPAADASDQDQPTVTNNPEPRG

SEQ ID NO: 1687 - DNA, 2575 bp, Homo sapien
ggaggaggaagcaagcgagggggctggttcctgagcttcgcaattcctgtgtcgccttctgggctcccagcctgccgggtcgcatgatccctccggccggagctggtttttttgccagccaccgcgaggccggctgagttaccggcatccccgcagccacctcctctcccgacctgtgatacaaaagatcttccgggggctgcacctgcctgcctttgcctaaggcggatttgaatctctttctctcccttcagaatcttatcttggctttggatcttagaagagaatcactaaccagagacgagactcagtgagtgagcaggtgttttggacaatggactggttgagcccatccctattataaaaatgtctcagagcaaccgggagctggtggttgactttctctcctacaagctttcccagaaaggatacagctggagtcagtttagtgatgtggaagagaacaggactgaggccccagaagggactgaatcggagatggagacccccagtgccatcaatggcaacccatcctggcacctggcagacagccccgcggtgaatggagccactggccacagcagcagtttggatgcccgggaggtgatccccatggcagcagtaaagcaagcgctgagggaggcaggcgacgagtttgaactgcggtaccggcgggcattcagtgacctgacatcccagctccacatcaccccagggacagcatatcagagctttgaacaggtagtgaatgaactcttccgggatggggtaaactggggtcgcattgtggcctttttctccttcggcggggcactgtgcgtggaaagcgtagacaaggagatgcaggtattggtgagtcggatcgcagcttggatggccacttacctgaatgaccacctagagccttggatccaggagaacggcggctgggatacttttgtggaactctatgggaacaatgcagcagccgagagccgaaagggccaggaacgcttcaaccgctggttcctgacgggcatgactgtggccggcgtggttctgctgggctcactcttcagtcggaaatgaccagacactgaccatccactctaccctcccacccccttctctgctccaccacatcctccgtccagccgccattgccaccaggagaaccactacatgcagcccatgcccacctgcccatcacagggttgggcccagatctggtcccttgcagctagttttctagaatttatcacacttctgtgagacccccacacctcagttcccttggcctcagaattcacaaaatttccacaaaatctgtccaaaggaggctggcaggtatggaagggtttgtggctgggggcaggagggccctacctgattggtgcaacccttaccccttagcctccctgaaaatgtttttctgccagggagcttgaaagttttcagaacctcttccccagaaaggagactagattgcctttgttttgatgtttgtggcctcagaattgatcattttccccccactctccccacactaacctgggttccctttccttccatccctaccccctaagagccatttaggggccacttttgactagggattcaggctgcttgggataaagatgcaaggaccaggactccctcctcacctctggactggctagagtcctcactcccagtccaaatgtcctccagaagcctctggctagaggccagccccacccaggagggagggggctatagctacaggaagcaccccatgccaaagctagggtggcccttgcagttcagcaccaccctagtcccttcccctccctggctcccatgaccatactgagggaccaactgggcccaagacagatgccccagagctgtttatggcctcagctgcctcacttcctacaagagcagcctgtggcatctttgccttgggctgctcctcatggtgggttcaggggactcagccctgaggtgaaagggagctatcaggaacagctatgggagccccagggtcttccctacctcaggcaggaagggcaggaaggagagcctgctgcatggggtggggtagggctgactagaagggccagtcctgcctggccaggcagatctgtgccccatgcctgtccagcctgggcagccaggctgccaaggccagagtggcctggccaggagctcttcaggcctccctctctcttctgctccacccttggcctgtctcatccccaggggtcccagccaccccgggctctctgctgtacatatttgagactagtttttattccttgtgaagatgatatactatttttgttaagcgtgtctgtatttatgtgtgaggagctgctggcttgcagtgcgcgtgcacgtggagagctggtgcccggagattggacggcctgatgctccctcccctgccctggtccagggaagctggccgagggtcctggctcctgaggggcatctgcccctcccccaacccccaccccacacttgttccagctctttgaaatagtctgtgtgaaggtgaaagtgcagttcagtaataaactgtgtttactcagtgaaaaaaaaaaaaaaaaaa

SEQ ID NO: 1688 - protein, 233 aa, Homo sapien; identical to SEQ ID NO: 1168

SEQ ID NO: 1689 - DNA, 4853 bp, Homo sapien
ttcgccgtttgaattgctgcgggcccgggccctcacctcacctgaggtccggccgcccaggggtgcgctatgccgtcgggaggtgaccagtcgccaccgcccccgcctccccctccggcggcggcagcctcggatgaggaggaggaggacgacggcgaggcggaagacgccgcgccgtctgccgagtcgcccacccctcagatccagcagcggttcgacgagctgtgcagccgcctcaacatggacgaggcggcgcggcccgaggcctgggacagctaccgcagcatgagcgaaagctacacgctggagggaaatgatcttcattggttagcatgtgccttatatgtggcttgcagaaaatctgttccaactgtaagcaaagggacagtggaaggaaactatgtatctttaactagaatcctgaaatgttcagagcagagcttaatcgaattttttaataagatgaagaagtgggaagacatggcaaatctacccccacatttcagagaacgtactgagagattagaaagaaacttcactgtttctgctgtaatttttaagaaatatgaacccatttttcaggacatctttaaataccctcaagaggagcaacctcgtcagcagcgaggaaggaaacagcggcgacagccctgtactgtgtctgaaattttccatttttgttgggtgctttttatatatgcaaaaggtaatttccccatgattagtgatgatttggtcaattcttatcacctgctgctgtgtgctttggacttagtttatggaaatgcacttcagtgttctaatcgtaaagaacttgtgaaccctaattttaaaggcttatctgaagattttcatgctaaagattctaaaccttcctctgaccccccttgtatcattgagaaactgtgttccttacatgatggcctagttttggaagcaaaggggataaaggaacatttctggaaaccctatattaggaaactttatgaaaaaaagctccttaagggaaaagaagaaaatctcactgggtttctagaacctgggaactttggagagagttttaaagccatcaataaggcctatgaggagtatgttttatctgttgggaatttagatgagcggatatttcttggagaggatgctgaggaggaaattgggactctctcaaggtgtctgaacgctggttcaggaacagagactgctgaaagggtgcagatgaaaaacatcttacagcagcattttgacaagtccaaagcacttagaatctccacaccactaactggtgttaggtacattaaggagaatagcccttgtgtgactccagtttctacagctacgcatagcttgagtcgtcttcacaccatgctgacaggcctcaggaatgcaccaagtgagaaactggaacagattctcaggacatgttccagagatccaacccaggctattgctaacagactgaaagaaatgtttgaaatatattctcagcatttccagccagacgaggatttcagtaattgtgctaaagaaattgccagcaaacattttcgttttgcggagatgctttactataaagtattagaatctgttattgagcaggaacaaaaaagactaggagacatggatttatctggtattctggaacaagatgcattccacagatctctcttggcctgctgccttgaggtcgtcactttttcttataagcctcctgggaattttccatttattactgaaatatttgatgtgcctctttatcatttttataaggtgatagaagtattcattagagcagaagatggcctttgtagagaggtggtaaaacaccttaatcagattgaagaacagatcttagatcatttggcatggaaaccagagtctccactctgggaaaaaattagagacaatgaaaacagagttcctacatgtgaagaggtcatgccacctcagaacctggaaagggcagatgaaatttgcattgctggctcccctttgactcccagaagggtgactgaagttcgtgctgatactggaggacttggaaggagcataacatctccaaccacattatacgataggtacagctccccaccagccagcactaccagaaggcggctatttgttgagaatgatagcccctctgatggagggacgcctgggcgcatgcccccacagcccctagtcaatgctgtccctgtgcagaatgtatctggggagactgtttctgtcacaccagttcctggacagactttggtcaccatggcaaccgccactgtcacagccaacaatgggcaaacggtaaccattcctgtgcaaggtattgccaatgaaaatggagggataacattcttccctgtccaagtcaatgttggggggcaggcacaagctgtgacaggctccatccagcccctcagtgctcaggccctggctggaagtctgagctctcaacaggtgacaggaacaactttgcaagtccctggtcaagtggccattcaacagatttccccaggtggccaacagcagaagcaaggccagtctgtaaccagcagtagtaatagacccaggaagaccagctctttatcgcttttctttagaaaggtataccatttagcagctgtccgccttcgggatctctgtgccaaactagatatttcagatgaattgaggaaaaaaatctggacctgctttgaattctccataattcagtgtcctgaacttatgatggacagacatctggaccagttattaatgtgtgccatttatgtgatggcaaaggtcacaaaagaagataagtccttccagaacattatgcgttgttataggactcagccgcaggcccggagccaggtgtatagaagtgttttgataaaagggaaaagaaaaagaagaaattctggcagcagtgatagcagaagccatcagaattctccaacagaactaaacaaagatagaaccagtagagactccagtccagttatgaggtcaagcagcaccttgccagttccacagcccagcagtgctcctcccacacctactcgcctcacaggtgccaacagtgacatggaagaagaggagaggggagacctcattcagttctacaacaacatctacatcaaacagattaagacatttgccatgaagtactcacaggcaaatatggatgctcctccactctctccctatccatttgtaagaacaggctcccctcgccgaatacagttgtctcaaaatcatcctgtctacatttccccacataaaaatgaaacaatgctttctcctcgagaaaagattttctattacttcagcaacagtccttcaaagagactgagagaaattaatagtatgatacgcacaggagaaactcctactaaaaagagaggaattcttttggaagatggaagtgaatcacctgcaaaaagaatttgcccagaaaatcattctgccttattacgccgtctccaagatgtagctaatgaccgtggttcccactgaggttagtctcttgtattaaactcttcacaaaatctgtttagcagcagcctttaatgcatctagattatggagcttttttccttaatccagctgatgagttacagcctgttagtaacatgaggggacattttggtgagaaatgggacttaactccttccagtgtccttagaacattttaattcatcccaactgtctttttttccctaccactcagtgattactgtcaaggctgcttacaatccaaacttgggtttttggctctggcaaagcttttagaaatactgcaagaaatgatgtgtacccaacgtgagcataggaggcttctgttgacgtctccaacagaagaactgtgtttcaagttcaatcctacctgttttgtggtcagctgtagtcctcataaaaagcaaaacaaaaattaggtattttgtcctaaaacacctggtaggagtgtgtgattttttgcattcctgacaaaggagagcacacccaggtttggaggtcctaggtcattagccctcgtctcccgttccctttgtgcacatcttccctctccccattcggtgtggtgcagtgtgaaaagtccttgattgttcgggtgtgcaatgtctgagtgaacctgtataagtggaggcactttagggctgtaaaatgcatgattttgtaacccagattttgctgtatatttgtgatagcactttctacaatgtgaactttattaaatacaaaacttccaggctaaacatccaatattttctttaatgcttttatatttttttaaaatgttaaaacccctatagccaccttttgggaatgttttaaattctccagttttttgttatatagggatcaaccagctaagaaaagattttaagtcaagttgaattgaggggattaatatgaaaacttatgacctcttcctttaggagggagttatctaaaagaaatgtctattaaggtgatatatttaaaaatatttttgggtgttcctggcagtttaaaaaaattggttggagaatttaggtttttattagtaccatagtaccatttatacaaattagaaaatgttatttaacagctgaattatctatacatatctttattaatcactattgttccagcagttttcaagtcaaattaataatcttattagggagaaaattcaattgtaaattgaatcagtataaacaaagttactaggtaacttcatattgctgagagaaatatggaacttacattgttcaattagaatagtgttctccccaaatatttataaaacttctcaagatactgctacgtgtaattttatatgaagataagtgtatttttcaataaagcatttataaattaaaaaaaaaaaaaaaaaa

SEQ ID NO: 1690 - protein, 1139 aa, Homo sapien
MPSGGDQSPPPPPPPPAAAASDEEEEDDGEAEDAAPSAESPTPQIQQRFDELCSRLNMDEAARPEAWDSYRSMSESYTLEGNDLHWLACALYVACRKSVPTVSKGTVEGNYVSLTRILKCSEQSLIEFFNKMKKWEDMANLPPHFRERTERLERNFTVSAVIFKKYEPIFQDIFKYPQEEQPRQQRGRKQRRQPCTVSEIFHFCWVLFIYAKGNFPMISDDLVNSYHLLLCALDLVYGNALQCSNRKELVNPNFKGLSEDFHAKDSKPSSDPPCIIEKLCSLHDGLVLEAKGIKEHFWKPYIRKLYEKKLLKGKEENLTGFLEPGNFGESFKAINKAYEEYVLSVGNLDERIFLGEDAEEEIGTLSRCLNAGSGTETAERVQMKNILQQHFDKSKALRISTPLTGVRYIKENSPCVTPVSTATHSLSRLHTMLTGLRNAPSEKLEQILRTCSRDPTQAIANRLKEMFEIYSQHFQPDEDFSNCAKEIASKHFRFAEMLYYKVLESVIEQEQKRLGDMDLSGILEQDAFHRSLLACCLEVVTFSYKPPGNFPFITEIFDVPLYHFYKVIEVFIRAEDGLCREVVKHLNQIEEQILDHLAWKPESPLWEKIRDNENRVPTCEEVMPPQNLERADEICIAGSPLTPRRVTEVRADTGGLGRSITSPTTLYDRYSSPPASTTRRRLFVENDSPSDGGTPGRMPPQPLVNAVPVQNVSGETVSVTPVPGQTLVTMATATVTANNGQTVTIPVQGIANENGGITFFPVQVNVGGQAQAVTGSIQPLSAQALAGSLSSQQVTGTTLQVPGQVAIQQISPGGQQQKQGQSVTSSSNRPRKTSSLSLFFRKVYHLAAVRLRDLCAKLDISDELRKKIWTCFEFSIIQCPELMMDRHLDQLLMCAIYVMAKVTKEDKSFQNIMRCYRTQPQARSQVYRSVLIKGKRKRRNSGSSDSRSHQNSPTELNKDRTSRDSSPVMRSSSTLPVPQPSSAPPTPTRLTGANSDMEEEERGDLIQFYNNIYIKQIKTFAMKYSQANMDAPPLSPYPFVRTGSPRRIQLSQNHPVYISPHKNETMLSPREKIFYYFSNSPSKRLREINSMIRTGETPTKKRGILLEDGSESPAKRICPENHSALLRRLQDVANDRGSH

SEQ ID NO: 1691 - DNA, 2078 bp, Homo sapien
tgggcaattaaccaagccatagccaatgaatatgaagtccggagaaagctgctaataaaacgtttggatgtcactgtacaatcctttggctggtctgacagagctaagagccagacagaaaaattagccaaggtttaccagccgaaacgttcagtcttatcccctaaaactactatttctgttgcccatcttttggctgcaaggcaggacttgtcaaagattttaaggacaagcagcggctctataagagaaaagactgcctgtgccatcaataaggtgttgatgggcagggtgcctgacagaggtggtagacccaatgaaatcgaacctccacccccagagatgccaccgtggcagaagaggcaagatggcccccagcagcaaacaggaggccgagtaggagggagaggtggctatgaacattcctcatacggaggacgaggaggtcatgaacaaggaggcgggagaggtggacgtggtggctatgaccatggtggccgagggggaggaagaggaaataagcatcaaggaggctggacagatggagggagtggtggaggaggtggctaccaagatggtggttatcgagattcaggtttccagccaggtggctatcatggtggccacagcagtggtggctatcaaggcggaggttatggtggcttccaaacatcttcttcatatacaggaagtggataccagggtggtggctaccagcaggacaatagataccaagatggcgggcaccatggtgatcgtggtggtggtcgtggtgggcgaggtggtcgtggaggccgaggtggtcgtgcaggccagggaggaggctggggaggaagagggagccagaattatcaccaagggggtcaatttgaacagcatttccagcatggaggttatcagtataatcattctggatttggacagggaagacattacactagttgaggctaccgaactttacattttgctagagctcaagtaatagaaacttagtttcagaatcctgaattcagcacctattttgaattaatgtgagaccacaggtggcaggcagattcctgcttggcataagcatttgtaggtcttcattcaattctgttagatttttttattggacttacataatgccgtttatttgagaaacacataacatctctccttcctatgaaaaattttttaaaaggtggttaaaattgcctttaattgcccagtagactaattccacagtcagaacatgcaaacttttttgaagaaattacttgaataagtagttttcatgttttcaatatgcagttttgaaaatgaggattcacctagacttttttagatttactactaggaaaccttcctcatatgaataaccatttatatgtgttttgcttaaagtattccaatgcctattttccaagcacagttctgccccccggttgacttttatgccacgtgtgcttcatgatggaacttttaggtcagttcctattaaatgagctcttctgcagatagcacattcagtagccttattttgttgatggaatactgtatcatatgctcaactctgaaaaccttgaacacggccaaaatccataaagattataaaagcaaactaagttgtgaagctatagtacatgtaggcatttagttaagtatagcaattcaaactgacctgcatccatccaaaacaaattcctccttcaaccttatttttacttgaaatttgctagaagaaatagcaaaccgaaatttgttttatgcatgagttaataccactggctcagcaaatacaagttagtttgctttaagcaggtaactttttttgtaatggaagaaatgcactacaaagttaagacagatttttgctaagtgcaggaggccctttattattgctgcagaaaacaaaagcctggctgagttgatgttttacattctcccttactgaaatctacatgacatgatgcttcttgctgggtttttgtacatgtaaacattgtcaagctgtgaaagaaaatggctggaggtgtgctttgtgtgaaaggtgagcaataaagtatctgttaagttcaaaaaaaaaaaaaaaaaaa

SEQ ID NO: 1692 - protein, 314 aa, Homo sapien
WAINQAIANEYEVRRKLLIKRLDVTVQSFGWSDRAKSQTEKLAKVYQPKRSVLSPKTTISVAHLLAARQDLSKILRTSSGSIREKTACAINKVLMGRVPDRGGRPNEIEPPPPEMPPWQKRQDGPQQQTGGRVGGRGGYEHSSYGGRGGHEQGGGRGGRGGYDHGGRGGGRGNKHQGGWTDGGSGGGGGYQDGGYRDSGFQPGGYHGGHSSGGYQGGGYGGFQTSSSYTGSGYQGGGYQQDNRYQDGGHHGDRGGGRGGRGGRGGRGGRAGQGGGWGGRGSQNYHQGGQFEQHFQHGGYQYNHSGFGQGRHYTS

SEQ ID NO: 1693 - DNA, 3911 bp, Homo sapien
  Unsure 432: Unknown base
  Unsure 847: Unknown base
  Unsure 904: Unknown base
  Unsure 1401: Unknown base
  Unsure 1600: Unknown base
  Unsure 1631: Unknown base
aaaccctgttcttgggtgggtgtgggtataatactaagttgagatgatatcatttacgggggaaggcgctttgtgaagtaggccttatttctcttgtcctttcgtacagggaggaatttgaagtagatagaaaccgacctggattactccggtctgaactcagatcacgtaggactttaatcgttgaacaaacgaacctttaatagcggctgcaccattgggatgtcctgatccaacatcgaggtcgtaaaccctattgttgatatggactctagaataggattgcgctgttatccctagggtaacttgttccgttggtcaagttattggatcaattgagtatagtagttcgctctgactggtgaagtcttagcatgtactgctcggaggttgggttctgctccgaggtcgccccaaccgaaatttttaatncaggtttggtagtttagggcctgtgggtttgttaggtactgtttgcattaataaattaaagctccatagggtcttctcgtcttgctgtgtcatgcccgcctcttcacgggcaggtcaatttcactggttaaaagtaagagacagctgtaccctcgtggagccattcatacaggtccctagttaaggaacaagtgattatgctacctttgcacggttagggtaccgcggccgttaaacatgtgtcactgggcaggcggtgcccctaatactggtgatgctagaggtgatgtttttggtaaacaggcggggtaagatttgccgagttccttttactttttttaacctttccttatgagcatgcctgtgttgggttgacagtgagggtaataatgacttgttggttgattgtagatantgggctgttaattgtcagttcagtgttttaatctgacgcaggcttatgcggaggagnatgttttcatgttacttatactaacattagttcttctatagggtgatagattggtccaattgggtgtgaggagttcagttatatgtttgggattttttaggtagtgggtgttgagcttgaacgctttcttaattggtggctgcttttaggcctactatgggtgttaaattttttactctctctacaaggttttttcctagtgtccaaagagctgttcctctttggactaatagttaaatttacaaggggatttagagggttctgtgggcaaatttaaagttgaactaagattctatcttggacaaccagctatcaccaggctcggtaggtttgtcgcctctacctataaatcttcccactattttgctaaaagagcacacccgtctatgtacggaattccgggaagaacttaagcgacaatcttgaacaccccttctcatgtgatgtgaaatgaaaccatttggaaaagtttcttctagccagtaatagattttttntttaattgctctgccttgtgccgagagatgttcttttaagatgaatcttttgatgtctgataccaccaaatataggtggtagggagagttggaggctggccctttgagcaggccattagcttacttgctgggcatttccgatagcttattgcctacccttttgctggaaacaagctgatttgaaaaaccaaatctatgnagactgcagctaaggattttatcggtagacntaagagcttttgtccttgtggatattttagtggaaccacatcagtctcaatactgtcattttacactgactcagagcagctgacttcattccttgccacgatatatatttaaggcaggcattgtaacagacataaagacaacttatctgtttcagcaggaaggattcagtttatgaactctcagaccagatcatgttgaacaaggagactttgatgtgtgtcatgaggaaactcattctttacttcccagtcaatttaaaggccagctatcctgagctactcgaatgaatgcactggttaaacattggaaatagtttgtttatatccttgtctctctctaggccaattgtgattacatgactcgactctacatctcgtcaaacaaggcctaggtctggttgctgtagactgctcgccctcaacaaataaaatctggttgactagcctccttgtatatacaactattatttgttaagaagaaattatcgtcaattttctactaccttccaattgtcagctctttttttcctctctggtttttcctacactttacagaaaaagacattgatctatactgccattccctctaatcctgccatactcagtcaaaaggaatgacttaagatgaagatgatcatctgctcgagtcaaaatatacattgtatataagaattggtgattagaaaagcaaaaaacctaaaacttaaatctaggagtctgtatactgtctccatgtctccatgcctcagatctcatctaaatctttgaacagcaccattcaaccaatctgaggccttgacttgcttgtaagatgattctcagagatcggctgagttaaaaaagatgacgacttgattaccaaagaaagtagggccaactttgacaaatctggctctgctgaccctgtcactcccagatgtagcatagactcctaaacagaacctcaagtctgattgaggataaggccttctcctgagctgaaagttctttggcagatgagcaagaaactgaaagctgatgtacctgactggctctgtaagatcagaaaactgtatccagaataagccctatggattaacccctgagtacccagagtaaaaactaatttacagaacttccttattgatctgctggttcttccagatcatattctggctattggtatggctggcctttctgaaggtaccctgcttgtctattttcctgactcagctcttgcctgcctttttcacatgttgctgcaattagactcaccgtgaggactacagtcaatttcagtctatcttgtgcccaatacaacaaggatttttaatagtaacaacccacacctcacccactaggactcaatgttcacaacaggaaggaccattgctgcatactccttgaccagcaacttttttgaagatatttttaagtgcagagtaggcctctattcctgtatgtaattgttcattttcagcacctggaacctcatctatcgggtctggaaggaatacagcagttcgaaagccgcgtccatttctctccttcagtagtgcagaaatgagtccgattcaccagtacacacagaactgtaccagttcaacctagcaaaagaagaaaagtttccactgtacttaaaatttacagctgactcaaattgcctcacagaattacttgatgtagaaggctagtcgtcttacttcggatcagcaggacagttgggctctcagactcatgaccactgagtttgcttgtgttgaaactgtggtttcatccaacatatgctattggacatgattattattccattcaaatggattacagacttcttgaggacaggacaaacttatctctcatggtgtttttttagaatacttttataaccaaggaagaaaccatgccagctgttaccattcaacttcttaagcagagattaagctttttcatatctgttcttatcctggacatcagtagtttttaattgcccagcatccgttccatcttgtaacaactccctgatgtttcttaaaaccacctcttcctattttcagtctgtggtttggacagtctgacccaaccttgagctttgtgggtgaacatgtaattcagacctcatcaatcagcaaatccatctgaactgtggaggagaagctctctttactgagggtgctttagctttgtaggatgaaaacctcaaactaacagggcctaccatgtagagaatgaagccagtgcaggggaaagcagagccaaaatatggagagacttgaatcctgatgacagcgtttgtgcccctgg

SEQ ID NO: 1694 - DNA, 1209 bp, Homo sapien
gacccgggagaaggagggccaagatggcggaagcggaggagtctccaggagacccggggacagcatcgcccaggcccctgtttgcaggcctttcagatatatccatctcacaagacatccccgtagaaggagaaatcaccattcctatgagatctcgcatccgggagtttgacagctccacattaaatgaatctgttcgcaataccatcatgcgtgatctaaaagctgttgggaaaaaattcatgcatgttttgtacccaaggaaaagtaatactcttttgagagattgggatttgtggggccctttgatcctttgtgtgacactcgcattaatgctgcaaagagactctgcagatagtgaaaaagatggagggccccaatttgcagaggtgtttgtcattgtctggtttggtgcagttaccatcaccctcaactcaaaacttcttggagggaacatatctttttttcagagcctctgtgtgctgggttactgtatacttcccttgacagtagcaatgctgatttgccggctggtacttttggctgatccaggacctgtaaacttcatggttcggctttttgtggtgattgtgatgtttgcctggtctatagttgcctccacagctctccttgctgatagccagcctccaaaccgcagagccctagctgtttatcctgttttcctgttttactttgtcatcagttggatgattctcacctttactcctcagtaaatcaggaatgggaaattaaaaaccagtgaattgaaagcacatctgaaagatgcaattcaccatggagctttgtctctggcccttatttgtctaattttggaggtatttgataactgagtaggtgaggagattaaaagggagccatatagcactgtcaccccttatttgaggaactgatgtttgaaaggctgttcttttctctcttaatgtcatttctttaaaaatacatgtgcatactacacacagtatataatgcctccttaaggcatgatggagtcaccgtggtccatttgggtgacaaccagtgacttgggaagcacatagatacatcttacaagttgaatagagttgataactattttcagttttgagaataccagttcaggtgcagctcttaaacacattgccttatgactattagaatatgcctctcttttcataaataaaaatacatggtctaaaaaaaaaaaaaaaa

SEQ ID NO: 1695 - protein, 236 aa, Homo sapien
MAEAEESPGDPGTASPRPLFAGLSDISISQDIPVEGEITIPMRSRIREFDSSTLNESVRNTIMRDLKAVGKKFMHVLYPRKSNTLLRDWDLWGPLILCVTLALMLQRDSADSEKDGGPQFAEVFVIVWFGAVTITLNSKLLGGNISFFQSLCVLGYCILPLTVAMLICRLVLLADPGPVNFMVRLFVVIVMFAWSIVASTALLADSQPPNRRALAVYPVFLFYFVISWMILTFTPQ

SEQ ID NO: 1696 - DNA, 3359 bp, Homo sapien
cgccgaggtatcacctggcaccacccgcaccctcaccccgtgtctccatgccctgcctctgctccccacacccctcacctcaagctgtcccctcacctcacgcttggctgtctcctgatcctcagcctctcccaggtaccccagactctgtaggagagtgcccgagggcggagggccagccatgctgaccttccttccctccccccaggagctgttcacccgctcactggctgagagcgagctccgtagtgccccgtatgagttccccgaggagagccccattgaacagctggaggagcggcggcagcggctggagcggcagatcagccaggatgtcaagctggagccagacatcctgcttcgggccaagcaagatttcctgaagacggacagtgactcggacctacagctctacaaggaacagggtgaggggcagggtgacgggagcctgcgggagcgtgatgtgctggaacgggagtttcagcgggtcaccatctctggggaggagaagtgtggggtgccgttcacagacctgctggatgcagccaagagtgtggtgcgggcgctcttcatccgggagaagtacatggccctgtccctgcagagcttctgccccaccacccgccgctacctgcagcagctggctgaaaagcctctggagacccggacctatgaacagggccccgacacccctgtgtctgctgatgccccggtgcacccccctgcgctggagcagcacccgtatgagcactgtgagccaagcaccatgcctggggacctgggcttgggtctgcgcatggtgcggggtgtggtgcacgtctacacccgcagggaacccgacgagcattgctcagaggtggagctgccataccctgacctgcaggaatttgtggctgacgtcaatgtgctgatggccctgattatcaatggccccataaagtcattctgctaccgccggctgcagtacctgagctccaagttccagatgcatgtgctactcaatgagatgaaggagctggccgcccagaagaaagtgccacaccgagatttctacaacatccgcaaggtggacacccacatccatgcctcgtcctgcatgaaccagaagcatctgctgcgcttcatcaagcgggcaatgaagcggcacctggaggagatcgtgcacgtggagcagggccgtgaacagacgctgcgggaggtctttgagagcatgaatctcacggcctacgacctgagtgtggacacgctggatgtgcatgcggacaggaacactttccatcgctttgacaagtttaatgccaaatacaaccctattggggagtccgtcctccgagagatcttcatcaagacggacaacagggtatctgggaagtactttgctcacatcatcaaggaggtgatgtcagacctggaggagagcaaataccagaatgcagagctgcggctctccatttacgggcgctcgagggatgagtgggacaagctggcgcgctgggccgtcatgcaccgcgtgcactcccccaacgtgcgctggctggtgcaggtgccccgcctctttgatgtgtaccgtaccaagggccagctggccaacttccaggagatgctggagaacatcttcctgccactgttcgaggccactgtgcaccctgccagccacccggaactgcatctcttcttagagcacgtggatggttttgacagcgtggatgatgagtccaagcctgaaaaccatgtcttcaacctggagagccccctgcctgaggcgtgggtggaggaggacaacccaccctatgcctactacctgtactacacctttgccaacatggccatgttgaaccacctgcgcaggcagaggggcttccacacgtttgtgctgaggccacactgtggggaggctgggcccatccaccacctggtgtcagccttcatgctggctgagaacatttcccacgggctccttctgcgcaaggcccccgtcctgcagtacctgtactacctggcccagatcggcatcgccatgtctccgctcagcaacaacagcctcttcctcagctatcaccggaatccgctaccggagtacctgtcccgcggcctcatggtctccctgtccactgatgatcccttgcagttccacttcaccaaggagccgctgatggaggagtacagcatcgccacccaggtgtggaagctcagctcctgcgatatgtgtgagctggcccgcaacagcgtgctcatgagcggcttctcgcacaaggtaaagagccactggctgggacccaactataccaaggaaggccctgaggggaatgacatccgccggaccaatgtgccagacatccgcgtgggctaccgctacgagaccctgtgccaggagctggcgctcatcacgcaggcagtccagagtgagatgctggagaccattccagaggaggcgggtatcaccatgagcccagggcctcaatgagcctggtccatgaagtgcccaccacatcgcagcacttttaccacgttttgtcctcagaccccgcccatgctgtgtggtctctgcatgtctccattcttctctgtctctgtcttgcatgtctcctaccatgtcactgtccctgggccacccagtgaaagcaaagcctgggaatctgctcattgttgtttgggctcaggtattgagcctgatggcccaggtattgagggcctcccctgctggtggccctgtcctgggatcctcagaagcctgactgtcctatgggcttctccagtgtccacaggggcttgggatggttgtggggggctggcccctctagcctttccggtccttcctgggcaaatctaagccttggccagggcgaagtttaggcccctgtcttgttcatgtagccgaggggcaggcgggggacctctacacctctgctgtgggcacggggctgctgagggtctgtggaactccagcagctctgcactgggtagagctgggcctagagctcagtcacaggcctgggcttcctggcctgagtgggtagacgcaggcggcagaggtgctggaccacatctccgccaagtcactgcccagcagccttctccgtcctgtccccagcccacgtgctccttgggtgtcagcttcctgtgcctctgtgggagaggcagctgccttgtgttatgtctggggccacagttgctgcaaagtcctggatctgccactcaaccccgggagtggtgttcccagtgtggctcccagagctttgaccagattgtgatcccagctggcccctatgttgtgttctggactgaggcctttgctgtgaactgcagtgtttcatacgaaccatctttcctagtgcatgagaaataaagattatttaagt

SEQ ID NO: 1697 - protein, 760 aa, Homo sapien
MLTFLPSPQELFTRSLAESELRSAPYEFPEESPIEQLEERRQRLERQISQDVKLEPDILLRAKQDFLKTDSDSDLQLYKEQGEGQGDGSLRERDVLEREFQRVTISGEEKCGVPFTDLLDAAKSVVRALFIREKYMALSLQSFCPTTRRYLQQLAEKPLETRTYEQGPDTPVSADAPVHPPALEQHPYEHCEPSTMPGDLGLGLRMVRGVVHVYTRREPDEHCSEVELPYPDLQEFVADVNVLMALIINGPIKSFCYRRLQYLSSKFQMHVLLNEMKELAAQKKVPHRDFYNIRKVDTHIHASSCMNQKHLLRFIKRAMKRHLEEIVHVEQGREQTLREVFESMNLTAYDLSVDTLDVHADRNTFHRFDKFNAKYNPIGESVLREIFIKTDNRVSGKYFAHIIKEVMSDLEESKYQNAELRLSIYGRSRDEWDKLARWAVMHRVHSPNVRWLVQVPRLFDVYRTKGQLANFQEMLENIFLPLFEATVHPASHPELHLFLEHVDGFDSVDDESKPENHVFNLESPLPEAWVEEDNPPYAYYLYYTFANMAMLNHLRRQRGFHTFVLRPHCGEAGPIHHLVSAFMLAENISHGLLLRKAPVLQYLYYLAQIGIAMSPLSNNSLFLSYHRNPLPEYLSRGLMVSLSTDDPLQFHFTKEPLMEEYSIATQVWKLSSCDMCELARNSVLMSGFSHKVKSHWLGPNYTKEGPEGNDIRRTNVPDIRVGYRYETLCQELALITQAVQSEMLETIPEEAGITMSPGPQ

SEQ ID NO: 1698 - DNA, 6497 bp, Homo sapien
atggagggcctggctggctatgtatacaaggcggccagcgagggcaaggtgctgactctggccgccttgcttctcaaccggtctgaaagcgacatccgctatctgcttggctatgtcagccagcagggagggcagcgctccacgcccctcatcatcgcagcccgcaatggacacgcaaaggtggtacgcttgctcttagaacattaccgggtgcagactcagcagactggcaccgtccgcttcgacgggtatgtcattgatggtgccactgctctttggtgtgcagctggagcaggacattttgaagttgttaaacttctagtcagccatggagccaacgtgaaccataccacagtaactaattcaacccccctgcgggcagcatgctttgatggcagactggacattgtgaaatacttggttgaaaataatgccaacatcagcattgccaacaaatatgacaacacctgcctaatgattgcggcatataagggacacactgatgtggtcagataccttttagaacaacgtgctgatcccaatgccaaagcacattgtggagccacagcattgcactttgcagctgaagctgggcacatagatattgtgaaagagctgataaaatggcgtgctgctatagtagtgaatggccatgggatgacgccattgaaagtagctgccgaaagctgtaaagctgatgtcgtagaactgttactctctcatgctgattgcgaccgaagaagtcggattgaagctttggaactcttgggtgcctcctttgcaaatgaccgtgagaactatgacatcataaagacataccactatctatatttagccatgttagagaggttccaagatggtgataacattctcgaaaaagaggttcttccaccaatccatgcttatgggaatagaactgaatgtagaaatcctcaggaactggagtccattcggcaagacagagatgctcttcatatggaaggccttatagttcgggaacggattttaggtgctgacaatattgatgtttctcatcccatcatttacagaggagctgtttatgcggataatatggaatttgagcagtgtatcaagttgtggcttcatgccctgcacctcagacaaaaaggtaacaggaacacccacaaggatcttcttcgatttgctcaagttttctcacaaatgatacatttgaatgaaactgtgaaggccccagacatagaatgtgttttgagatgcagtgttttggaaatagaacaaagtatgaacagagtgaaaaatatttcagatgctgatgtccacaatgctatggacaattatgaatgtaatctctatacctttctgtatttagtgtgcatctctaccaaaacacagtgcagcgaagaagatcagtgcaaaattaacaagcagatctacaacctgattcaccttgatcccagaactcgtgaaggtttcaccttgctgcatctggctgtcaactccaatactccagttgatgatttccacaccaatgacgtctgcagctttccaaatgcacttgtcacaaagctcctgctggactgtggtgctgaggtgaatgccgtggacaatgagggaaacagtgcccttcatattatcgttcagtacaacaggcccatcagtgattttttgaccttgcactccatcatcattagcctagttgaagccggagctcacactgacatgacgaataaacagaataagactccgctagacaaaagtacaactggggtatctgaaatactgcttaaaactcaaatgaagatgagtctcaagtgcctggctgcccgagcagttcgggctaatgacattaactaccaagaccagatccccagaactcttgaagagtttgttggatttcattaagtgactggatatgtaaagtcgtttaatgtggtgctaaaaagtaaaggacttttaatcacagacagtagaattatgtgttcataaattctgcttttctttccactacccttcctcccatcccatccttccttagttctgtatttgtttttcttgcctcatggtaattgatttcagacagactttaacaaaaccacattgttttggtgtaactataaggtatttgcatattggttacctatttgtctttcttttttttaaaggaacagatataaaatgttttgtttatgtaacaagggacatttataatttcaagttgataatgttttaaacagctgcttacaaaagtatttctgttaagcctatgtcagcatgttatccatgcagcagttttgaggattttatgaagaaaaagagctaaaaaggaacattaagaggaatgggatatccaggtgttctgcacatgccaaactgctgtagatagtttacactcttccattatttatacggagtgatgcagcacattttagcattcaggaggatttttaaaaaatagctgcagattaatctggaaaatgtgctaatttaataatagttacaaatttataaatttaaatccatttgaaattgttgcattatgctgggtagtatatacaaaatggttatcatcttaaaccaacttttcagagaatcttgatggactctgcctttaggcttgaattcttcaaagtctattttaatgaaatttatctaaattgcagcagtctatttgattcagctcatagacatgtaaaaattatgaatgctgttttcttatgaaacaaattgtcacagtgtagttatacattctatttttgtccccttttccctttttctcctgtatcttttaaaatttggaaactacttttccagaaggcattatttatgcctccctaataaggtattttacttatgacagatgaaaaggaaccaggatatgtttgaattttttcactttcttagtctgtgacaagaagtagaaatatcactagtgtggtataggaacttacatgttttttatgatgaaaataattctcaatgccacttgaaaggtaattgtgtctgagagctgcaaatttttcaaccacaaaatgtcacttattcctacaggctatacagaggtctttatggtttttttgttttgttttaatggcaacattgtaactgtcaaactaaaagggtattctgtgattatcttttaagcattacagaaattcaagtgaaagttatatgcttatttctattgatgttaaaaatgataatgaaagcaaaattagctgtatctgtaattttctctctagtgccaaatgaatgccttagctactcatagtgcatggtactgtaagtgaagacctgtagctttttttttttctttaatgaaaagcattataatgatgtagcagcatcagatataaacttaaaaaaaaaggtttcaattaacattttatatatggataatgctttgtaaagtgtaagagaaaggttgcagttggatcagtataaaacaatgaccaagccaaaatcagcaccctagggccttaaataaaatagagataccccacaaaatgaaatattttgaaggatgggaggggacagaaggggggactatcccccaaggatgcaagatactttttacagttgctatcattatactttgtcttcttgcttcagttaggaaggttttgatggtaaattctgtcatggtaatagatacctattttcctaacctgagattttacaaggaaggtttttaggttggcttaaatggaggtatttatttgagtgagccctaatttgaaaattaccagacttgatcctcctggtatgaatcaaggaaatactgtaccttgctcttagcaactctcagtggcctgaaagagaaaatgcacttcttcaaggtgagtgaatcatgctttttccacagttcagatcagaccctttatttttcaaactacaaggcctgcttattggacagtctaaggaatagctttgatacttggtattcagttggttccattattaatgtatattatttttatttaaacatcaaaacttaaaatatcagataatgttgcatgttttaaaaacacatttcatccctttggctacccaggaccagcactatttaagacactgcttatttataaaatgagaataatgattatatgtacatattcagacatcaaaatttaatgacattctattttgagaagggaagacaatgctgaagaaagtaaaactgttgattgaaatgctgacagggtggagaacgaatttgaagacagtggaataaactatgaactatgctaatggtaattagattttttgtttgtttagtatagtggtaaattgtgtagtatcttgctgagaatctaattctatcttgtaaaatcaatccaaatgtgtattgtgaaacacctgtataaaatcatttttgaaataagtgatctacatgcctgtttttttaaaatgtttttggtagaattgtttgaaaatatgtttagccagacccttccccaacttaatttttttttaaaaaaggaaaataggtaagaaaatgatagttctatatctcagccctctgtgaactctaggctgtctccattttgcagccactttggtcatttgatgtttactattggtatacttatgctttgaattgtaaatcttcattgatggtattacagattcaaccaaaacttctctgtcctgttcagtaattgttatataaatctggatgagctagggaggcccaggtggatgttttcattcgcaaatcatgagaaacttaagtgggttttatgcacttgatagagttggcaaaattgaactatgaagttaactatttaactcaaggaatgggcggcaaacccatcccctcgattgataaagaaggggaacatttttacattagaactgacactgaaaacatagctttttcagtccaccctggttgctctagtagcccacagcccaatcacgttaaggttctttgctgtgggaattttaaataaaccaaaccccaaagcagaccatctgtaagctttggtctgcttgtttctgagaagggttttatttcattatactaatagtggactaataattggtaattgtgagaacttaggtatgataacattgtttgaagtaaaatatgatttgggggcagcagctttctaaataccaactctgtttgacaaatgttttgaaaattaaaatttcaagtgagcaacaccctgttaagagttttcactatagttgaggcagctactttatgaataagaccactttgggttatttaagcagaagcgtttcttttttttttttggaatggggtgggatgaggagtgagttgccagacctttgattagtttgctggtttagaaacagccagtggctgaattagtgagtaaatgaatgaaagtataaaggacttgttttttatgatagattttctgtaagaatcttaaatgttccttttcaaattagatgtgttgatgcacacatgactattctgtttttctcactgactatataacattaaaaaggggttaaagaaaacaaaactctgccttttgtgctatgaaatatttttagtccagaggttttaagctgtgtgtccattcctactctgaaaatgcatagctttgttctggatgtcatctcttgaaagtagaaaactcctatgtgtttatcacattgcagggctttcttatgtatttctggcagacttgcccaaatctttagatgggctgggttatacagcatgccctcccccaaataagggatctgaaataaatactacactattgatagtggagatatattaatttttaaaactgtaaagtaaatgtggtctctaggtttgtggtgtgtacctttgtgttaatgtgtagggaagagacagtgacttgatggttatggggagtgtatcttgatgtgtgtataggggtaagtattgctaaattatttacagcttttattcagggtgagtcatgtgatgaatggcctaatcagaaaagtgaaggagcgaagatgcaagcttgccaaatgatgaaatgaacaagattttgtatctattttttatcaggtgttgtaaaatttgtgcatggctttttgttgttgttgcttagtaactggtagaggagaaaagatgaggaaagaaactcagctttcctcacagtcttttcaaaggtacacagttggggagtaaaatctgactggcctaatcgatggaaaagaccctgtccttttcaccccatcctgcaatcctccgtgcagaggaactacactgttgtattctagtaattcactgtgatttataacaaaccggtgatgtcattctattgtgcacttttgtcaaaccatttatgtgactttaataaacatagtaaacttgctgactgcaccagaggtccattagtgatttatatattgcatgacattttctatttgagtttgacatgtagagtcatttttagtttcatggcaattgacagtcctaataactcagctaatttgaaactaacaatcttgctgtgtaaaaggaaaaaatggtgtttgtgttcagtaaatgtttg

SEQ ID NO: 1699 - DNA, 6578 bp, Homo sapien
ggtgaacagctcaaatccattttttacatcacagaccaaagccaatgggaatcctgcttgttcggcccagttgcagcatgtctcgccacccatttttccagctcatttagcaagtgtgtcaactccattgttgtcctcaatggaaagtgtcataaatccaaatataacttctcaggataaaaatgaacaaggtggtatgttatgttcccaaatggaaaatttacctagtactgccttgccagcacaaatggaagatctaaccaaaacagttctgcctttgaatattgacagtggctcagatcctttccttcctttacctgcagaaagtagttcaatgtctctcttcccttcaccagcagatagtgggactaattctgttttttcccaactggaaaataatacaaatcattattcctcacagattgaaggaaacactaattcctcctttctaaaggggggtaatggtgaaaatgcagtttttccttcacaagtgaatgttgcaaataacttcagtagcaccaatgcccaacagtctgcacctgaaaaagttaaaaaagaccgtgggcggggcccaaatgggaaggaaagaaaacctaagcacaacaaaagggctaaatggcctgcaattatcagagatgggaaatttatctgtagcaggtgttacagggcttttactaatcccagatcactgggtgggcacttatccaagcgatcttactgtaaaccactggatggagccgaaattgctcaagaacttctacagagtaatggacagccttctcttcttgccagcatgattctctccacaaatgcagtaaatttgcagcagccacaacaatctaccttcaatccagaagcatgttttaaagatccatcatttctacagcttcttgctgaaaatcgctcgccagcatttttaccaaatacatttcctcgatctggtgtgactaactttaataccagtgtcagtcaagaaggtagtgaaattattaaacaggctttggaaactgctggcattcccagtacatttgagggtgccgaaatgctttctcatgtttcaacaggttgtgtctctgatgcatcacaagtaaatgcaacggtgatgccaaatccaactgtaccacccctgttgcacactgtatgccatccaaacaccttgctgaccaaccagaataggacgtcaaactccaaaacttcctccattgaggaatgtagcagcttgcctgtttttccaacgaatgacttactactgaagactgttgaaaatggtttgtgctctagttcatttcctaattctggtgggccatcacaaaattttaccagtaacagttctcgtgtttctgttataagtggtcctcagaacacaagatccagtcatttaaataaaaagggaaacagtgcttctaagagaagaaagaaagttgctcctccactaattgcacctaacgcttcccaaaacttggtaacaagtgacttaacaacaatgggactcatagcaaagagtgttgaaatcccaactactaaccttcattcaaatgtaattccaacttgtgaacctcagagtttggtggaaaatctaacacagaaattaaataatgttaacaatcagttatttatgactgatgtaaaagagaatttcaaaaccagtcttgagtcccatacagtgttagcccctttaacattaaaaactgaaaatggtgattcccaaatgatggctttgaattcatgcacaacttcagtaaattctgatttgcagatttctgaagacaatgttatacaaaactttgaaaagactcttgaaattattaaaactgctatgaattctcaaatacttgaggtaaaaagtggatctcagggtgctggtgaaacttcacaaaatgctcaaataaattataacattcagcttccttcagtaaacactgtgcaaaataacaaattacccgattcttctccgttttcctcctttataagtgtcatgccaacaaaaagtaacattcctcagtctgaagtatcacataaggaggatcaaatacaggaaattttagaaggcttacagaaattaaaattagaaaatgacctatccactccagcatcccaatgtgtactgataaatacatcagtgacactgactcccacgcctgttaaatcaactgcagatatcacagttattcagccagtttctgaaatgataaacattcaatttaatgacaaagttaataaaccctttgtgtgtcaaaaccaaggctgtaactacagtgctatgacaaaggatgcactatttaagcactatggtaaaattcatcaatacactccagaaatgattcttgaaattaagaagaatcaattgaaatttgctccctttaaatgtgtagtacctacatgtacaaaaacatttacaagaaattctaacctccgggcacactgtcagttggtgcatcattttacaactgaagaaatggtaaagttaaaaattaaaaggccttatggaagaaaatctcagagtgaaaatgtgccggcctcacgaagtacacaagtgaaaaaacagctagctatgacagaggaaaataaaaaggaatctcagcctgctttagaattgagagcagagacccaaaatacccacagtaatgtagcagtgatcccagaaaaacaacttatagaaaaaaaaagtcctgacaaaacagaaagttctttacaagtgattacagttacttcagaacaatgtaatacaaatgcactcacaaacacacaaaccaaaggacggaagattaggaggcataaaaaagaaaaggaggagaaaaaacgaaagaagccagtttcccaatcccttgagtttccaacaagatacagtccttacagaccttatcgatgtgttcaccagggatgctttgctgcctttacgatacagcaaaatttgattctccattaccaggctgtacacaaatcagatctacctgcattttcagcagaggtcgaagaggaaagtgaagctggtaaagaaagtgaagaaactgaaactaaacaaactttgaaagaatttcgatgtcaggtaagtgactgttctcgaattttccaagcaattactggcctaatacaacactacatgaaacttcatgaaatgactcctgaagaaattgaaagtatgactgcttcagtggatgttgggaagtttccatgtgaccagttagagtgtaaatcttcatttactacatatttgaactatgttgttcatctagaggcagaccacgggattggactaagggcaagtaaaacagaagaagatggtgtatacaaatgtgattgtgaaggctgtgaccgtatatatgcaacccggtcgaatctcctccgacacatttttaataagcataatgacaaacataaggctcatttgattcgtccaagaagattaacaccaggccaggaaaatatgtcaagcaaggcaaaccaagaaaaatcaaagtctaaacatcgggggacgaagcacagcagatgtggaaaggaaggaataaaaatgcccaagaccaaacgaaagaaaaaaaataatttagaaaacaagaatgcaaagattgtgcagattgaagaaaataagccttattctctgaaacgtgggaagcatgtatattctataaaggctagaaatgatgccctgtctgagtgtacaagcagatttgtaacccagtatccatgtatgataaagggatgtacttcagttgttacaagtgaaagcaatataattagacattataagtgccataaattatctaaggcatttacatcacaacaccgaaatcttcttattgtattcaaacggtgttgcaactcacaagtaaaggaaacgtctgagcaagaaggtgctaagaatgatgtgaaagattctgacacgtgtgtatcagagagcaatgataattcaagaacaacagctacagtttcacaaaaggaagttgaaaaaaatgaaaaagatgaaatggatgaactaacagaattgtttattacaaaattaataaatgaagatagcacaagtgtagagacccaagctaatacttcttcaaatgtaagtaatgattttcaggaagataacctctgccagtcagaaagacaaaaagcaagtaatttgaagagagttaataaggaaaaaaatgtctcacaaaataaaaaaaggaaagttgaaaaagctgaaccagcatcagcagctgagttaagtagcgtgcgtaaagaagaagaaactgctgttgccattcaaaccattgaggagcatcctgcatcttttgactggagctcttttaagccaatgggatttgaagtatcatttctgaagtttcttgaggagtctgcagtgaagcagaagaaaaatactgacaaagaccatccgaatactggaaacaaaaaaggatcccattcaaattcaagaaaaaatattgataagactgctgtgactagtggaaatcatgtatgtccttgtaaagaaagcgaaacgtttgtacagtttgccaatccatcacagcttcagtgcagtgataatgtaaaaattgttttagacaagaatcttaaagattgcactgagcttgtcttaaagcaacttcaggaaatgaaacctaccgtcagtctgaaaaaacttgaagtacattcaaatgatccagatatgtctgttatgaaagatatcagtataggtaaagccacaggcagaggtcagtactgataattaatgtagtataaatacatcatttaccattttattttaaataggaagccatcaagcatgctagaattgtgaaactttcattatatttttttgttgttgacatgaattaacctggccaaaaacaaaaaagaaaaaaaaaacatgacatttgtcatgtaaaacttttttttatccctatgggacttgaggaacagaatcagtacttcagttattgtaaatagtgagctaaacctcaaatttctatcacccagttgcccttttcatgaactaaacaattatctgtgtgattggtatgtttcaccaggtcactgctcatgtataacagtactctttatttgtagataccttttttgtatatatttattattgtaaatcatgtgctgccaccagcagtctgtaagtctaaactattaaatgacacatttatatttggaattttaatttttaactaagcgatcaagttttttaaattgttcttttattgttttaaattaagaactttttgaactaaaaccagaaactctgccatagttcattgatttttacatgaaacatttatttacaagatgatatcaagattacttttcacaaaataggcacattatatcaacactttgctctgctttgtaaatttgccatccaggattttggggtggtattcatgtgaaattaaagcagattctctagcagtttcctatagctacagtttttttttttcattgcttctaattggatatagttactatgagtccatgaaatacaatggaaatgtgaataaagaatttactacattgaagattttaaacatttggtattaaaaaaaaatcctttgtgaatgtgatagaaaactagtagtgtggagcagtgtaaatatttgaggtggtgatttgtgaagtagcccagtattgccttaaataaaatcacatttcatttcttgttttatacatgtgatcttataaagattttttgttttgttttgttttccattttctgagatttatagattggtgtatagctttaaactgtataaagttttgtggaaagatttttttaaacatttttataaatcttaaaattgatatcatcaaagtgagcccatcttgtgtttataaaatacaagagtccttaacatttataattacatagataaaacactttctataaggaagttggatgttttgattttactgtttatagatgttagattgtacagatttgtctgtatttctcaccatatctaatgatacttttttcattagattggtcttcaagaacagtattagttataattattttggttattcagtatatagttagctcttacagtttagctttattcaccatatttatactgtggattcacagcgagaggtagaggttattccaggagagttgatgaccttcatttaaagtccaactaaaatcagtagtagaaacataagaaaacatctttgcaatatttacttttgtttctgtttgccgtaaatagtaacattgtttttttttattttgtgtttgttataaaacagttgcattcacaatattattggcctgagatattgatgatattgtgatggtatgaaaatgtgtacattccctgtgcaacatcagatttgcaggaaaaatgaagcacttactgaaatcgctggtactctgaataaataagcatggtcaaggagtgaactattttcttttggaaatttctttttaatttttattattaaagtattttatttttagggccttttgggttttattgaatagttcatttcacctgtttaagacttactaccaataagcataaaacctgacacgttaaaatccctgccctttggtgagcccactgttatttattaaaataaaagttattttatgggtgatt

SEQ ID NO: 1700 - protein, 1563 aa, Homo sapien
VNSSNPFFTSQTKANGNPACSAQLQHVSPPIFPAHLASVSTPLLSSMESVINPNITSQDKNEQGGMLCSQMENLPSTALPAQMEDLTKTVLPLNIDSGSDPFLPLPAESSSMSLFPSPADSGTNSVFSQLENNTNHYSSQIEGNTNSSFLKGGNGENAVFPSQVNVANNFSSTNAQQSAPEKVKKDRGRGPNGKERKPKHNKRAKWPAIIRDGKFICSRCYRAFTNPRSLGGHLSKRSYCKPLDGAEIAQELLQSNGQPSLLASMILSTNAVNLQQPQQSTFNPEACFKDPSFLQLLAENRSPAFLPNTFPRSGVTNFNTSVSQEGSEIIKQALETAGIPSTFEGAEMLSHVSTGCVSDASQVNATVMPNPTVPPLLHTVCHPNTLLTNQNRTSNSKTSSIEECSSLPVFPTNDLLLKTVENGLCSSSFPNSGGPSQNFTSNSSRVSVISGPQNTRSSHLNKKGNSASKRRKKVAPPLIAPNASQNLVTSDLTTMGLIAKSVEIPTTNLHSNVIPTCEPQSLVENLTQKLNNVNNQLFMTDVKENFKTSLESHTVLAPLTLKTENGDSQMMALNSCTTSVNSDLQISEDNVIQNFEKTLEIIKTAMNSQILEVKSGSQGAGETSQNAQINYNIQLPSVNTVQNNKLPDSSPFSSFISVMPTKSNIPQSEVSHKEDQIQEILEGLQKLKLENDLSTPASQCVLINTSVTLTPTPVKSTADITVIQPVSEMINIQFNDKVNKPFVCQNQGCNYSAMTKDALFKHYGKIHQYTPEMILEIKKNQLKFAPFKCVVPTCTKTFTRNSNLRAHCQLVHHFTTEEMVKLKIKRPYGRKSQSENVPASRSTQVKKQLAMTEENKKESQPALELRAETQNTHSNVAVIPEKQLIEKKSPDKTESSLQVITVTSEQCNTNALTNTQTKGRKIRRHKKEKEEKKRKKPVSQSLEFPTRYSPYRPYRCVHQGCFAAFTIQQNLILHYQAVHKSDLPAFSAEVEEESEAGKESEETETKQTLKEFRCQVSDCSRIFQAITGLIQHYMKLHEMTPEEIESMTASVDVGKFPCDQLECKSSFTTYLNYVVHLEADHGIGLRASKTEEDGVYKCDCEGCDRIYATRSNLLRHIFNKHNDKHKAHLIRPRRLTPGQENMSSKANQEKSKSKHRGTKHSRCGKEGIKMPKTKRKKKNNLENKNAKIVQIEENKPYSLKRGKHVYSIKARNDALSECTSRFVTQYPCMIKGCTSVVTSESNIIRHYKCHKLSKAFTSQHRNLLIVFKRCCNSQVKETSEQEGAKNDVKDSDTCVSESNDNSRTTATVSQKEVEKNEKDEMDELTELFITKLINEDSTSVETQANTSSNVSNDFQEDNLCQSERQKASNLKRVNKEKNVSQNKKRKVEKAEPASAAELSSVRKEEETAVAIQTIEEHPASFDWSSFKPMGFEVSFLKFLEESAVKQKKNTDKDHPNTGNKKGSHSNSRKNIDKTAVTSGNHVCPCKESETFVQFANPSQLQCSDNVKIVLDKNLKDCTELVLKQLQEMKPTVSLKKLEVHSNDPDMSVMKDISIGKATGRGQY

SEQ ID NO: 1701 - DNA, 8018 bp, Homo sapien
cgccgctctgagtccagcctcctactgagaacagtccctcccttgtgcgggtcgcacggctagccgcaggttcggccacgtcaaatccattttctaaaaaagcagggagcagagctctctcttcgccgccgacgcagaaaggagctggggaggaaaaagctgctgccttttgcgctggagattcgtgggcaaggcttctcattttcccaggctgcttcccctcccgggtgaggagcgtcctgagactaaggaaagagcctggaaaatggagcagacctggacgagagattattttgcagaggatgatggggagatggtacccagaacgagtcacacagcagcttttcttagtgacactaaagatcgaggccctccagtgcagtcacagatctggagaagtggtgaaaaggtcccgtttgtgcagacatattccttgagagcatttgagaaaccccctcaggtacagacccaggctcttcgagactttgagaagcacctcaatgacctgaagaaggagaacttcagcctcaagctgcgcatctacttcctggaggagcgcatgcaacagaagtatgaggccagccgggaggacatctacaagcggaacattgagctgaaggttgaagtggagagcttgaaacgagaactccaggacaagaaacagcatctggataaaacatgggctgatgtggagaatctcaacagtcagaatgaagctgagctccgacgccagtttgaggagcgacagcaggagacggagcatgtttatgagctcttggagaataagatccagcttctgcaggaggaatccaggctagcaaagaatgaagctgcgcggatggcagctctggtggaagcagagaaggagtgtaacctggagctctcagagaaactgaagggagtcaccaaaaactgggaagatgtaccaggagaccaggtcaagcccgaccaatacactgaggccctggcccagagggacaagagaattgaagaactgaatcagagcctggctgcccaggagaggcttgtagaacagctatctcgggagaaacaacaactgctacatctgttggaggagccaactagcatggaagtgcagcccatgactgaagagttgctgaaacaacaaaagctgaattcacatgagaccactataactcagcagtctgtatctgattcccacttggcagaactccaggaaaaaatccagcaaacagaggccaccaacaagattcttcaagagaaacttaatgaaatgagctatgaactaaagtgtgctcaggagtcgtctcaaaagcaagatggtacaattcagaacctcaaggaaactctgaaaagcagggaacgtgagactgaggagttgtaccaggtaattgaaggtcaaaatgacacaatggcaaagcttcgagaaatgctgcaccaaagccagcttggacaacttcacagctcagagggtacttctccagctcagcaacaggtagctctgcttgatcttcagagtgctttattctgcagccaacttgaaatacagaagctccagagggtggtacgacagaaagagcgccaactggctgatgccaaacaatgtgtgcaatttgtagaggctgcagcacacgagagtgaacagcagaaagaggcttcttggaaacataaccaggaattgcgaaaagccttgcagcagctacaagaagaattgcagaataagagccaacagcttcgtgcctgggaggctgaaaaatacaatgagattcgaacccaggaacaaaacatccagcacctaaaccatagtctgagtcacaaggagcagttgcttcaggaatttcgggagctcctacagtatcgagataactcagacaaaacccttgaagcaaatgaaatgttgcttgagaaacttcgccagcgaatacatgataaagctgttgctctggagcgggctatagatgaaaaattctctgctctagaagagaaagaaaaagaactgcgccagcttcgtcttgctgtgagagagcgagatcatgacttagagagactgcgcgatgtcctctcctccaatgaagctactatgcaaagtatggagagtctcctgagggccaaaggcctggaagtggaacagttatctactacctgtcaaaacctccagtggctgaaagaagaaatggaaaccaaatttagccgttggcagaaggaacaagagagtatcattcagcagttacagacgtctcttcatgataggaacaaagaagtggaggatcttagtgcaacactgctctgcaaacttggaccagggcagagtgagatagcagaggagctgtgccagcgtctacagcgaaaggaaaggatgctgcaggaccttctaagtgatcgaaataaacaagtgctggaacatgaaatggagattcaaggcctgcttcagtctgtgagcaccagggagcaggaaagccaagctgctgcagagaagttggtgcaagccttaatggaaagaaattcagaattacaggccctgcgccaatatttaggagggagagactccctgatgtcccaagcacccatctctaaccaacaagctgaagttacccccactggccgtcttggaaaacagactgatcaaggttcaatgcagataccttccagagatgatagcacttcattgactgccaaagaggatgtcagcatacccagatccacattaggagatttggacacagttgcagggctggaaaaagaactgagtaatgccaaagaggaacttgaactcatggctaaaaaagaaagagaaagtcagatggaactttctgctctacagtccatgatggctgtgcaggaagaagagctgcaggtgcaggctgctgatatggagtctctgaccaggaacatacagattaaagaagatctcataaaggacctgcaaatgcaactggttgatcctgaagacataccagctatggaacgcctgacccaggaagtcttacttcttcgggaaaaagttgcttcagtagaatcccagggtcaagaaatttcaggaaaccgaagacaacagttgctgctgatgctagaaggactagtagatgaacggagtcggctcaatgaggccttacaagcagagagacagctctatagcagtctggtgaagttccatgcccatccagagagctctgagagagaccgaactctgcaggtggaactggaaggggctcaggtgttacgcagtcggctagaagaagttcttggaagaagcttggagcgcttaaacaggctggagaccctggccgccattggaggtgcagctgcaggggatgacaccgaagatacaagcactgagttcactgacagtattgaggaggaggctgcacaccatagtcaccagcaacttgtcaaggtggctttggagaaaagtctggcaactgtggagacccagaacccatctttttcccctccttctccgatgggaggggacagtaacaggtgtcttcaggaagaaatgctccacctgagggctgagttccaccagcacttagaagagaagaggaaagctgaggaggaactgaaggagctaaaggctcaaattgaggaagcaggattctcctcagtgtcccacatcaggaacaccatgctgagcctttgccttgagaatgcggagctgaaagagcagatgggagaagcaatgtctgatggatgggagatcgaggaagacaaggagaagggcgagttggataaccagtcccagcctcgtgaccctgggcctcagtcagcgtttagcctaccagggtccacccagcacctgcgctcccagctgtcacaatgcaaacaacgctatcaagatctccaggagaagctgctgctatcagaagccactgtctttgctcaggctaacgagctggagaaatacagagttatgcttacaggtgaatccttggtgaagcaggacagcaagcagatccaggtggacctccaggacctgggctatgagacttgtggccgaagcgagaatgaggctgaacgggaggaaaccaccagtcctgagtgtgaggagcacaacagcctcaaggaaatggtcctgatggaggggctgtgctctgagcagggacgccggggctcaacactggctagttcctctgagaggaagcccttggagaaccagctagggaagcaggaagagttccgggtatatggaaagtcagaaaacatcttggtcctacgaaaggacatcaaagatctgaaggcccagctgcagaatgccaacaaggtcattcaaaacctcaagagccgggtccggtccctctcagttacaagtgattattcgtctagtctggaaagaccccggaagctgagagctgttggcaccttggaggggtcttcacctcatagtgtccctgatgaggatgaggggtggctgtctgatggcactggggctttctactctccagggcttcaggccaaaaaggacctggagagtctcatccagagagtatcccagctggaggcccagctcccaaaaaatggactagaagagaagctggctgaggagctgagatcagcctcgtggcctgggaaatatgattccctgattcaggatcaggcccgggaactgtcttacctacggcaaaaaatacgagaagggagaggtatttgttatcttatcacccggcatgcaaaagatacagtaaaatcttttgaggatctcctaaggagcaatgacattgactactacctgggacagagcttccgggagcaactcgcccagggaagccagctgacagagaggctcaccagcaaactcagcaccaaggatcataaaagtgagaaagatcaagctggacttgagccactggccctcaggctcagcagggagctgcaggagaaggagaaagtgattgaagtcctgcaggccaagctggatgctcggtccctcacaccctccagcagccatgccttgtctgactcccaccgctctcccagcagcacctctttcctgtctgatgaactggaagcctgctctgacatggacatagtcagcgagtacacacactatgaagagaagaaagcttctcccagtcactcagattccatccatcattcgagtcattctgctgtgttgtcttctaaaccatcatcaaccagtgcatctcagggggctaaggccgaatccaacagcaaccccatcagcttgccaactccccagaatacccccaaggaggccaaccaggcccattcaggtgccagcactgttcctcctgcttccacagctacattgctgagcaacgacttggaagccgactcttcctactacctcaactctgcccagcctcactctcctccaaggggcaccatagaactgggaagaatcctagagcctgggtacctgggcagcagtggcaagtgggatgtgatgaggcctcagaaagggagtgtatctggggacctatcctcaggctcctctgtgtaccagcttaactccaaacccacaggggctgacctgctggaagagcatcttggtgaaatccggaacctgcgccagcgcctggaggaatccatctgcatcaatgaccgcctacgggagcaactggaacaccggctgacctctactgctcgtggaaggggatccacttctaacttctacagtcagggcctggagtccatacctcagctctgcaatgagaacagagtcctcagggaagacaatcgaagacttcaggctcaactgagtcatgtttccagagagcactcccaggaaacagaaagcctgagggaggctctgctgtcctctcgatcccaccttcaagagctggaaaaggagctggagcaccagaaggtggaaaggcagcagcttttggaagacttgagggagaagcagcaagaggtcttgcatttcagggaggaacgtctttccctccaggaaaacgactccagactgcagcacaagctggttctcctgcagcaacagtgtgaagagaaacagcagctctttgagtccctccagtcagagctacaaatctacgaggcactttatggcaattccaagaaggggctgaaagcttacagcctggatgcctgtcaccaaatccctttgagcagtgacctgagccacctggtggcagaggtacgagctctgagagggcagctggagcagagcattcaggggaacaattgtctgcgactgcagctgcaacagcagctggagagcggtgctggcaaagccagcctcagcccctcctccattaaccagaacttcccagccagcactgaccctggaaacaagcagctgctcctccaagattcagctgtgtcccctccagtccgggatgttggtatgaattccccagctctggtcttccccagctctgcttcctctactcctggctcagaaacgcccataatcaacagagcaaatggcttgggtttggatacttctccagtaatgaagacccctcccaagctagagggtgatgctactgatggctcctttgccaataagcatggccgccatgtcattggccacattgatgactacagtgccctaagacagcagattgcggagggcaagctgctggtcaaaaagatagtgtctcttgtgagatcagcgtgcagcttccctggccttgaagcccaaggcacagaggtgctaggcagcaaaggtattcatgagcttcggagcagcaccagtgccctgcaccatgccctagaggagtcagcttccctcctcaccatgttctggagagcggccctgccaagcacccacatccctgtgctgcctggcaaagtgggagaatcaacagaaagggaacttctggaactgagaaccaaagtatccaaacaggagcgactccttcagagcacaactgagcatctgaagaacgccaaccagcagaaggagagcatggagcagttcattgtcagccagctaaccagaacacatgatgttttaaagaaggcaaggactaacttagaggtgaaatccctaagggctctgccatgtactccagccttgtgacccttgccttccaggaaccatgcaagaagcgcagccaccagaagtccttaaaacagcaggaaaggtgggcctgtcccccttttgtgcagctacctatctgctgaggagcatctgggcctcattcctccaagtccacgggagggtccagaagagggagtcagagatgtatcctggtggagctgggagaaaggcagaaagcctttctgacggctatggaatacgattagccaaggtccacttggcccagcactaagaaaaagatgcgtagtttgcacagaaggttttgtgatcctgcctctcaacagccccagcagcttgggaactagcaagagcacatttcttgcctcatcagctgtcctgagatggaaaactcagtgaatataggaccctgattccgatgaaaggggcacgtggtcccaatgctggagctcctctggcaggttctaaaagcacactactgagcagcggtgccctgccggacactgctggcgggggctcagtgagcactactcacagatccacacctgaccctgttgggtcgagtcaggctgggccttggtctgcactgtagcacctgtgttctttgagttcacatcatgaatgtggtgacttcccagataccatctcaggcttaacctagcacatcctatttcttttcttctatgatatccaaattggactgacctcacttcaaagttgctgtcccattttgtcaccctatcttatctcggggaaattgcagactgatggccagaccaactctgttgaaattcttgcatagagcaaacctgtgctcatttttaagtggcatgggagaggccccaagcctagtaaagcctagtctgtgtcttcacagtgctggtagaatgtgtttgtgtgtataaatatatgatatagatttatatatgttgctaacgccatatattgaaggccaacataactggtggacagggtgggtgacagaaaatgaaagtctttttggtgattgttaaagcaaaatgtgtataaagaaataaatagtttttctttc

SEQ ID NO: 1702 - DNA, 5726 bp, Homo sapien
tgccatgctgctgcacggacaggatgtgatcactgtgtccaatggaggccgaatcatgcgttcctgggagactaacatcgggggcctgaactgggagataaccctggacagtggcagtttccaggcacttgggctggttggcctgcaggagtctgtaaggtacatcgcagtcctgaagaagactacacttgccctccatcacctctccagtgggcacctcaagtgggtggaacatctcccagaaagtgacagcatccactaccagatggtgtattcttacggctctggggtggtgtgggccctcggagttgttcccttcagccatgtgaacattgtcaagtttaatgtggaagatggagagattgttcagcaggttagggtttcaactccgtggctgcagcacctgtctggagcctgtggtgtggtggatgaggctgtcctggtgtgtcctgacccgagctcacgttccctccaaactttggctctggagacggaatgggagttgagacagatcccactgcagtctctcgacttagaatttggaagtggattccaaccccgggtcctgcctacccagcccaacccagtggacgcttcccgggcccagttcttcctgcacttgtccccaagccactatgctctgctgcagtaccattatggaacgctgagtttgcttaaaaacttcccacagactgccctagtgagctttgccaccactggggagaagacggtggctgcagtcatggcctgtcggaatgaagtgcagaaaagtagcagttctgaagatgggtcaatggggagcttttcggagaagtctagttcaaaggactctctggcttgcttcaatcagacctacaccattaacctatacctcgtggagacaggtcggcggctgctggacaccacgataacatttagcctggaacagagcggcactcggcctgagcggctgtatatccaggtgttcttgaagaaggatgactcagtgggctaccgggctttggtgcagacagaggatcatctgctacttttcctgcagcagttggcagggaaggtggtgctgtggagccgtgaggagtccctggcagaagtggtgtgcctagagatggtggacctccccctgactggggcacaggccgagctggaaggagaatttggcaaaaaggcagatggcttgctggggatgttcctgaaacgcctctcgtctcagcttatcctgctgcaagcatggacttcccacctctggaaaatgttttatgatgctcggaagccccggagtcagattaagaatgagatcaacattgacaccctggccagagatgaattcaacctccagaagatgatggtgatggtaacagcctcaggcaagctttttggcattgagagcagctctggcaccatcctgtggaaacagtatctacccaatgtcaagccagactcctcctttaaactgatggtccagagaactactgctcatttcccccatcccccacagtgcaccctgctggtgaaggacaaggagtcgggaatgagttctctgtatgtcttcaatcccatttttgggaagtggagtcaggtagctcccccagtgctgaagcgccccatcttgcagtccttgcttctcccagtcatggatcaagactacgccaaggtgttgctgttgatagatgatgaatacaaggtcacagcttttccagccactcggaatgtcttgcgacagctacatgagcttgccccttccatcttcttctatttggtggatgcagagcagggacggctgtgtggatatcggcttcgaaaggatctcaccactgagctgagttgggagctgaccattcccccagaagtacagcggatcgtcaaggtgaaggggaaacgcagcagtgagcacgttcattcccagggccgtgtgatgggggaccgcagtgtgctctacaagagcctgaaccccaacctgctggccgtggtgacagagagcacagacgcgcaccatgagcgcacctttattggcatcttcctcattgatggcgtcactgggcgtatcattcactcctctgtgcagaagaaagccaaaggccctgtccatatcgtgcattcagagaactgggtggtgtaccagtactggaacaccaaggctcggcgcaacgagtttaccgtactggagctctatgagggcactgagcaatacaacgccaccgccttcagctccctggaccgcccccagctgccccaggtcctccagcagtcctatatcttcccgtcctccatcagtgccatggaggccaccatcaccgaacggggcatcaccagccgacacctgctgattggactaccttctggagcaattctttcccttcctaaggctttgctggatccccgccgccccgagatcccaacagaacaaagcagagaggagaacttaatcccgtattctccagatgtacagatacacgcagagcgattcatcaactataaccagacagtttctcgaatgcgaggtatctacacagctccctcgggtctggagtccacttgtttggttgtggcctatggtttggacatttaccaaactcgagtctacccatccaagcagtttgacgttctgaaggatgactatgactacgtgttaatcagcagcgtcctctttggcctggtttttgccaccatgatcactaagagactggcacaggtgaagctcctgaatcgggcctggcgataaagaacaaagactgtgcctaaaagtggagagccaggggagtgtgggtcagataagcagctacagctgcagtttggtggattggtggagtatgtgtgtgtgtcagtgctcagctaagaactgtagggaagatggatgaccttcacgcagaactccttttgggatatacatgatgcagaaaggatcctacatggagagagacagaactctctcagctgacactctcagagattcctgatgggctttctcttgaagtccaaaggcgtctgcattgtttcctttctttgcccatccatgaatgttctgttttgttttttttaataagaattccggctgatttttgtgaggcctgtttaaattgactttactttgccttttgtgtttctcaattttatctagaaatctttctgactttttccatctcttgcttcaaagtaagaggggaactctccttgccgactccaccttataggtacatttggtgttttgcactgggaagaaataggatccatccttagctgaggcttgaggactgatccagcctctcatggcttccctccaaagtaacttagggttgagggatctatatgtgatgtcaaaacttactttaaacctctagtttcgtgctgtcatttattaggctgggccaccaaatctttgtttcaatttatcagaagccaagtgcatactagcgtcttgtttgttgcccattgcctatacttttcacctgagatgtgtgagttggggccttttaaaaactactgaattgtctgagccttgaagacatttccagggagaagagataatctctcatttcacccacaggctggtctaatcataacctagttaaagatgtccttgtttaagaaccccattatttatttttagtttttaatataaattaacatgtgggtcattatatttctccttaaatgaggaaattttaaattttattgatctaacctttgaagctttaaaaaaggagaaagagggtaggggtgggaaactggcatactgtgtgtatagcactgccgattggctaggccactgtgtctctgctacaaattaaagaaatcctaaaagttttccttggtcatagagttggggaatgacagaatttttctttgttgtgaaatgtatgtacagagtagaccatctctagccctgtggtgaaagaggtacactcgaatgtttgcataaagcaagtgacaaatgacactgtttaagtcctcttttgtgtcttagaagatcattttgaggctattttcacattagaggggataaaagcagtgaagacatggagtaagtgtattttattttagtaaggaaaggtcagtttaatcatatatgggttggttaggttatctaaaaatttgtcatctttctatggtcatatgctgatggtagattatggcagagaaggaagaggaaatgacaaccattttattaattgtcagtttgatattgagtgactgaatgtctaagaatctccagaaaaaaacaggcatctatcatcctgacccaaggcatattttaacataacctgggagaagagagttaagtacaagttaaaaaaaattctgccctagttttgagaaagcctggctggaattctgactgtcttacatacatatgtgcaaggttagcctgcaagattctagtttttatttaccagtgtgccagaatctgaaacaagctactgggagggaaggtatttgtcctttagtaaaattccctgtatttcagctgtaatcaaagttacctcaaagcaggtgctttttttttttttgagaccctggctcaaaaacaaaaacaaaaactagtttgttttagtattcattaattacgtatatgagcactggtagtctagtgtttgttcttgtatacagtgttttcttaaatgagatgatgctatttaattctgttacttgttttttcaactaatggatcttttaaagttttttatttaaattttttgtgggtacatattaggtacatatacttatggggtacatgagatgtttttataaaggctcagctaatgtatcttgaatatcatgtattcataaagatgactgaaatagtttctggaacaaagtctgatagaaaaaatactcaattcctaatttaagtgttagagactttaatgtaagctatctaatctgaactagtttcattatttgtgtgtgggtacatgttatgtgctccgtaaggcatctttcaatttgaaaatttcataattgtaatttcactgcctttataaattgcttttttttggaggcagggtctctgtcacccaggctggagagcagtggcacagtcatagctcactgcagcctcgaacacctgggctgaagtgatcctccctccttagcctcccaaagtgccgggattacaggcatgagctactgcacctggcccataaattgtcatacttttaaagagcctattacacaaagtatcatcagaatcatcccaagactcatttcctgattcctaattatttaaaattttgcttttaggcgaggcatggtggctcaagcctatggtcccagcactttgggaggccaaggcaggcagatcatttgaggtcaggagtttgggaccagcctggccaacatggtgaaacctgaaaccccatctctaccaaaaaaatggaaaaatttagccaggtgtggtggtgcatgcctgtaatcccagcctcccgagtagctggggctcaggcgtgcgccaccatgcccggctaatttttgtatatttatggaaatgccaagagatagttcaatctgcctctctggcaagccatggacaccaggtctgacaaactctcttactccttaagacaaatgctcacctgatcaatatggggaaataagctgcatggtaccataatttctattctaaaagggaaaagtatctctttggtattgctttggaaaacattctttataactatcttgctatttaaaaattgacaattatccttccataattaaaacaggtagacaac

SEQ ID NO: 1703 - protein, 905 aa, Homo sapien
AMLLHGQDVITVSNGGRIMRSWETNIGGLNWEITLDSGSFQALGLVGLQESVRYIAVLKKTTLALHHLSSGHLKWVEHLPESDSIHYQMVYSYGSGVVWALGVVPFSHVNIVKFNVEDGEIVQQVRVSTPWLQHLSGACGVVDEAVLVCPDPSSRSLQTLALETEWELRQIPLQSLDLEFGSGFQPRVLPTQPNPVDASRAQFFLHLSPSHYALLQYHYGTLSLLKNFPQTALVSFATTGEKTVAAVMACRNEVQKSSSSEDGSMGSFSEKSSSKDSLACFNQTYTINLYLVETGRRLLDTTITFSLEQSGTRPERLYIQVFLKKDDSVGYRALVQTEDHLLLFLQQLAGKVVLWSREESLAEVVCLEMVDLPLTGAQAELEGEFGKKADGLLGMFLKRLSSQLILLQAWTSHLWKMFYDARKPRSQIKNEINIDTLARDEFNLQKMMVMVTASGKLFGIESSSGTILWKQYLPNVKPDSSFKLMVQRTTAHFPHPPQCTLLVKDKESGMSSLYVFNPIFGKWSQVAPPVLKRPILQSLLLPVMDQDYAKVLLLIDDEYKVTAFPATRNVLRQLHELAPSIFFYLVDAEQGRLCGYRLRKDLTTELSWELTIPPEVQRIVKVKGKRSSEHVHSQGRVMGDRSVLYKSLNPNLLAVVTESTDAHHERTFIGIFLIDGVTGRIIHSSVQKKAKGPVHIVHSENWVVYQYWNTKARRNEFTVLELYEGTEQYNATAFSSLDRPQLPQVLQQSYIFPSSISAMEATITERGITSRHLLIGLPSGAILSLPKALLDPRRPEIPTEQSREENLIPYSPDVQIHAERFINYNQTVSRMRGIYTAPSGLESTCLVVAYGLDIYQTRVYPSKQFDVLKDDYDYVLISSVLFGLVFATMITKRLAQVKLLNRAWR

SEQ ID NO: 1704 - DNA, 6364 bp, Homo sapien
ggcccatggagctgcgtcacctgctgcgcccccggccaggattggactcggaaccaggcggagctgaggctggaaaggcccgacacgcaggtgctgtcatccgcacattatcaggcatggccaggcaccagggtcctgcacgtgctctgcgctactttgacctcacgcccagcatggcgggcatcatggtaccccctgtacagcgatggccagggcctggcttcacctttcatgcctggctctgtctgcaccctatggatacagcacctacccctgcccccacccgaccactccagcgaaagcagctgtacagcttctttaccagcagcggctcagggtttgaggccttcttcacggcggccgggaccctggtggtggctgtgtgcacacggaaggagtatttgaccatgagtttgcccgaagtgtcctttgccgactctgcctggcactgcgtggctatcgtccatgtgcctgggcgccggcccttcagccagaacctggtccatgtctacaaagacggccatctggtcaagacagcaccccttcgctgcccctccctcagtgagcctttctcctcctgctgtatcggctccgctggataccgcacaacgaccaccaccacagggctgcccacaccaccagtccccgccaccctggcctacactcaccccgccctcacccgctcccagtcagtcccagcctccacagggcttggctgggggtccgggctggtggcccccctgcaggagggcagcatcgactctaccctcgcaggcacccaggacactcggtggggcagccccacatccctggagggtgagctgggggctgtggccatctttcacgaagccctgcaggcgacggctctgaggaccctgtgcaccctggggcccaatgagacggcacccttcaagcctgagggggagctgcatgagctcagcaccaggctgctcctccattactcacctcaggcttgtaagaacaacatctgcctggacctgtcccccagtcatgggcttgatgggcgcctgacgggccacagagtggagacctgggatgtgaaggatgtggtgaactgcgttgggggtatgggtgccctgctgcccctgctggagcgagtagctgcacagcccaaagaggctgaagcaggtccagctgaaacgcatgacctcgtgggtcctgaactgacctctggtcacaacacccagggcctggttctcccattgggtaaatcttcagaggaacggatggagaggaacgcagtggctgcttttctgctgatgctgcggaacttccttcagggtcacatggtgaaccaagagagcctggtgcagtgccaggggcctgccatcatcggggccctcctgcgaaaggtcccaagctgggccatggacatgaacgtgctcatgtccgcccagctgctgatggagcaggtggcagctgagggcagcgggcccctcctgtacctactctaccagcatttgctcttcaactttcacctctggaccctcagtgacttcgccgtgcgcctcggtcacatccagtacatgtccagcatagttcgggagcacagacagaagctgcggaagaagtacggcgtccagtttatcttggatgctctgcgcacccactacagcccgcagcgggagcgccccctggctgctgacgacctacgcaccgtgcagacctccctcctgggcctggcgagggagttcctggtgcggagtctctcagcagatgacgtgcaggtcacgcagaccatgctgagctttttggcggccacaggcgatgacggtcagatcctgcgcagactgcagcagaatgagcggctacctgagcggagccgccagcgcctccggctgcgggagtgtggtctccagggtctggttgcctgcttgcctgaggggactgtttccccccagctctgccagggcctctacaagctgttcctgggggcaggatcaggcaacactgctggtggtggcggcagcagtgggactcttactccagccagccagcccggcactccttcgccactggatgggccgcggccctttcctgctgctcctggccgccacagctccagtctctccaatgtgctggaggacggcagcctcccggagcccaccattagcggggatgatacctcgaacaccagcaacccacagcaaacctctgaggaagagttgtgcaatctgctcaccaacgtgctgttctcggtgacgtggcgtggcgtggaaggcagcgatgaggctgcctggcgggagcgtggccaggttttctcagtgctcacccagctgggggcctcagccacacttgtgcgcccaccagactgcatcaagcgcagcctcctggagatgatgctggagtcagccctgaccgacatcaaagaggcccccgtgggggtcctggccagcctcacccagcaagcgctttggctgctgcgtctgctgcaggacttcctgtgtgctgaaggccatggtaaccaggaactgtggagtgagaagctctttgaaggtgtatgcagcctacttgatcgcctgggagcctggccccacctggccaacggcacagctgatctccgtgagatggcgcagattggcctacggcttgtacttggctacatcctgctggaagacccacagctgcatgcccaggcctacgtgagattgcacatgctgctacagactgcagtgccagcccgccgcgaggaggcctgctatgtgctctccaagctggaggctgcactggggcgggtgctgaacacctcttccttggagtcagccactgatgaggcagggtccccacttgcagctgcagcagctgcagcagctgcagagcgctgctcctggctggtaccactggtgcgcacgctgctagaccgtgcctatgagccgctggggctgcagtggggactgccctccctgccacccaccaatggcagccccaccttctttgaagacttccaggctttttgtgccacacccgaatggcgccacttcatcgacaaacaggtacagccaaccatgtcccagttcgaaatggacacgtatgctaagagccacgaccttatgtcaggtttctggaatgcctgctatgacatgcttatgagcagtgggcagcggcgccagtgggagcgcgcccagagtcgtcgggccttccaggagctggtgctggaacctgcgcagaggcgggcgcgcctggaggggctacgctacacggcagtgctgaagcagcaggcaacgcagcactccatggccctgctgcactggggggcgctgtggcgccagctcgccagcccatgtggggcctgggcgctgagggacactcccatcccccgctggaaactgtccagcgccgagacatattcacgcatgcgtctgaagctggtgcccaaccatcacttcgaccctcacctggaagccagcgctctccgagacaatctgggtgaggttcccctgacacccaccgaggaggcctcactgcctctggcagtgaccaaagaggccaaagtgagcaccccacccgagttgctgcaggaggaccagctcggcgaggacgagctggctgagctggagaccccgatggaggcagcagaactggatgagcagcgtgagaagctggtgctgtcggccgagtgccagctggtgacggtagtggccgtggtcccagggctgctggaggtcaccacacagaatgtatacttctacgatggcagcactgagcgcgtggaaaccgaggagggcatcggctatgatttccggcgcccactggcccagctgcgtgaggtccacctgcggcgtttcaacctgcgccgttcagcacttgagctcttctttatcgatcaggccaactacttcctcaacttcccatgcaaggtgggcacgaccccagtctcatctcctagccagactcccagaccccagcctggccccatcccaccccatacccaggtacggaaccaggtgtactcgtggctcctgcgcctacggcccccctctcaaggctacctaagcagccgctccccccaggagatgctgcgtgcctcaggccttacccagaaatgggtacagcgtgagatatccaacttcgagtacttgatgcaactcaacaccattgcggggcggacctacaatgacctgtctcagtaccctgtgttcccctgggtcctgcaggactacgtgtccccaaccctggacctcagcaacccagccgtcttccgggacctgtctaagcccatcggtgtggtgaaccccaagcatgcccagctcgtgagggagaagtatgaaagctttgaggacccagcagggaccattgacaagttccactatggcacccactactccaatgcagcaggcgtgatgcactacctcatccgcgtggagcccttcacctccctgcacgtccagctgcaaagtggccgctttgactgctccgaccggcagttccactcggtggcggcagcctggcaggcacgcctggagagccctgccgatgtgaaggagctcatcccggaattcttctactttcctgacttcctggagaaccagaacggttttgacctgggctgtctccagctgaccaacgagaaggtaggcgatgtggtgctacccccgtgggccagctctcctgaggacttcatccagcagcaccgccaggctctggagtcggagtatgtgtctgcacacctacacgagtggatcgacctcatctttggctacaagcagcgggggccagccgccgaggaggccctcaatgtcttctattactgcacctatgagggggctgtagacctggaccatgtgacagatgagcgggaacggaaggctctggagggcattatcagcaactttgggcagactccctgtcagctgctgaaggagccacatccaactcggctctcagctgaggaagcagcccatcgccttgcacgcctggacactaactcacctagcatcttccagcacctggacgaactcaaggcattcttcgcagaggttgtcagtgatggtgtacccctggtgctagccctggtcccccaccggcagccccactccttcatcacccagggttccccagacctgttggtgactgtgagtgccagtgggctgctgggcacccacagctggttgccctatgaccgcaacataagcaactacttcagcttcagcaaagaccccaccatgggcagccacaagacgcagcgactgctgagtggcccgtgggtgccaggcagtggtgtgagtggacaagcactggcagtggccccggatggaaagctgctattcagcggtggccactgggatggcagcctgcgggtgactgcactaccccgtggcaagctgttgagccagctcagctgccaccttgatgtagtaacctgccttgcactggacacctgtggcatctacctcatctcaggctcccgggacaccacgtgcatggtgtggcggctcctgcatcagggtggtctgtcagtaggcctggcaccaaagcctgtgcaggtcctgtatgggcatggggctgcagtgagctgtgtggccatcagcactgaacttgacatggctgtgtctggatctgaggatggaactgtgatcatacacactgtacgccgcggacagtttgtagcggcactacggcctctgggtgccacattccctggacctattttccacctggcattggggtccgaaggccagattgtggtacagagctcagcgtgggaacgtcctggggcccaggtcacctactccttgcacctgtattcagtcaatgggaagttgcgggcttcactgcccctggcagagcagcctacagccctgacggtgacagaggactttgtgttgctgggcaccgcccagtgcgccctgcacatcctccaactaaacacactgctcccggccgcgcctcccttgcccatgaaggtggccatccgcagcgtggccgtgaccaaggagcgcagccacgtgctggtgggcctggaggatggcaagctcatcgtggtggtcgcggggcagccctctgaggtgcgcagcagccagttcgcgcggaagctgtggcggtcctcgcggcgcatctcccaggtgtcctcgggagagacggaatacaaccctactgaggcgcgctgaacctggccagtccggctgctcgggccccgcccccggcaggcctggcccgggaggccccgcccagaagtcggcgggaacaccccggggtgggcagcccaggggggtgagcggggcccaccctgcccagctcagggattggcgggcgatgttaccccctcagggattggcgggcggaagtcccgcccctcgccggctgaggggccgccctgagggccagcactggcgtctgcggccgc

SEQ ID NO: 1705 - protein, 1133 aa, Homo sapien
NQESLVQCQGPAIIGALLRKVPSWAMDMNVLMSAQLLMEQVAAEGSGPLLYLLYQHLLFNFHLWTLSDFAVRLGHIQYMSSIVREHRQKLRKKYGVQFILDALRTHYSPQRERPLAADDLRTVQTSLLGLAREFLVRSLSADDVQVTQTMLSFLAATGDDGQAVGALDLLLALLHGSLVQESLAVFLLEPGNLEVLLALLVRPGSLPLLPDRVCKILRRLQQNERLPERSRQRLRLRECGLQGLVACLPEGTVSPQLCQGLYKLFLGADCLNLSDLLAVVQLSLQADLSVRLDICRQLFHLIYGQPDVVRLLARQAGWQDVLTRLYVLEAATAGSPPPSSPESPTSPKPAPPKPPTESPAEPSDVFLPSEAPCPDPDGFYHALSPFCTPFDLGLERSSVGSGNTAGGGGSSGTLTPASQPGTPSPLDGPRPFPAAPGRHSSSLSNVLEDGSLPEPTISGDDTSNTSNPQQTSEEELCNLLTNVLFSVTWRGVEGSDEAAWRERGQVFSVLTQLGASATLVRPPDCIKRSLLEMMLESALTDIKEAPVGVLASLTQQALWLLRLLQDFLCAEGHGNQELWSEKLFEGVCSLLDRLGAWPHLANGTADLREMAQIGLRLVLGYILLEDPQLHAQAYVRLHMLLQTAVPARREEACYVLSKLEAALGRVLNTSSLESATDEAGSPLAAAAAAAAAERCSWLVPLVRTLLDRAYEPLGLQWGLPSLPPTNGSPTFFEDFQAFCATPEWRHFIDKQVQPTMSQFEMDTYAKSHDLMSGFWNACYDMLMSSGQRRQWERAQSRRAFQELVLEPAQRRARLEGLRYTAVLKQQATQHSMALLHWGALWRQLASPCGAWALRDTPIPRWKLSSAETYSRMRLKLVPNHHFDPHLEASALRDNLGEVPLTPTEEASLPLAVTKEAKVSTPPELLQEDQLGEDELAELETPMEAAELDEQREKLVLSAECQLVTVVAVVPGLLEVTTQNVYFYDGSTERVETEEGIGYDFRRPLAQLREVHLRRFNLRRSALELFFIDQANYFLNFPCKVGTTPVSSPSQTPRPQPGPIPPHTQVRNQVYSWLLRLRPPSQGYLSSRSPQEMLRASGLTQKWVQREISNFEYLMQLNTIAGRTYNDLSQYPVV

SEQ ID NO: 1706 - DNA, 2463 bp, Homo sapien
caaacattgaggaaagccaggcagtagaggccgctatggcgaacgttccgtgggcagaggtctgcgagaaattccaggcggcgctcgctctgtcgcgggtggaactgcataaaaatccggagaaggaaccatacaagtccaaatacagcgcccgggcgctactggaagaggtcaaggcgctgctcggccctgcgcctgaggacgaggatgagcggcctgaggccgaggacagcccgggtgccggtgaccacgccctggggctgccggctgaggtggtggagcccgaggggcccgtcgcccagcgagcggtgaggctggcagtcatcgagttccacctcggggtgaaccacatcgacacggaggagctgtcggcgggggaggagcacctggtgaaatgcctgcggctgctgcgcaggtaccggctctcgcacgactgcatctctctctgcatccaggcgcagaataacctgggtatcttgtggtctgaaagagaagaaattgaaactgcacaggcttacctagagtcatcagaagcactatataatcagtatatgaaagaggttgggagtcctcctcttgatcctactgagcgttttcttcctgaagaagagaaacttactgaacaagagagatcaaaaagatttgaaaaggtttatactcataacctatattacctagctcaagtctaccagcatctggaaatgtttgagaaggctgctcactattgccatagtacactaaaacgccagcttgagcacaatgcctaccatcctatagagtgggctatcaatgctgctaccttgtcacagttttacatcaataagctatgctttatggaggccaggcactgtttatcagctgctaatgtcatttttggtcaaactggaaagatctcagccacagaagacactcctgaagctgaaggagaagtgccagagctttatcatcaaagaaagggggaaatagcaaggtgctggatcaaatactgtttgactctcatgcagaatgcccaactctccatgcaggacaacataggagagcttgatcttgataaacagtctgaacttagagctttaaggaaaaaagaactagatgaggaggaaagcattcggaaaaaagctgtgcagtttggaaccggtgaactgtgtgatgccatctctgcagtagaagagaaagtgagctacttgagacctttagattttgaagaagccagagaacttttcttattgggtcagcactatgtctttgaggcaaaagagttctttcagattgatggttatgtcactgaccatattgaagttgtccaagaccacagtgctctgtttaaggtgcttgcattctttgaaactgacatggagagacggtgcaagatgcataaacgcagaatagccatgctagagcccctaactgtagacctgaatccacagtattatctgttggtcaacagacagatccagtttgaaattgcacatgcttactatgatatgatggatttgaaggttgccattgctgacaggctaagggatcctgattcacacattgtaaaaaaaataaataatcttaataagtcagcactgaagtactaccagctcttcttagactccctgagagacccaaataaagtattccctgagcatataggggaagatgttcttcgccctgccatgttagctaagtttcgagttgcccgtctctatggcaaaatcattactgcagatcccaagaaagagctggaaaatttggcaacatcattggaacattacaaatttattgttgattactgtgaaaagcatcctgaggccgcccaggaaatagaagttgagctagaacttagtaaagagatggttagtcttctcccaacaaaaatggagagattcagaaccaagatggccctgacttaatccttgtttttaaagaaaggaaatgtgcaatattgaagtgatctttttccctagtcagacaggcccaattccattgtgatgtttacctttatagccaggtgagtgcagtttgaacttgagatacagtcaactgagtgtttgctaggatcctaaggaacataaagttaattaaaaacttacacctaattatgtaaattgccttgttaaagacatgtgatttgtattttagatgcttgtttcctattaaaatacagacatttctaccctcagtttctaaatgtagactatttgttggctagtacttgatagattccttgtaagaaaaaatgctgggtaatgtacctggtaacaagcctgttaatatattaagattgaaaaagtaacttctatagttactccttctaaaatatttgacttcctacattccccccacccaaaatctttcccttttgaaaatactaaaaactaagttatgttattataaagtgtaaaatggtttgtcttaattataggagaaaaaggccttgttagaaataaaataaactgacttatttcactaatg

SEQ ID NO: 1707 - DNA, 4182 bp, Homo sapien
  Unsure 4174: Unknown base
ccagtttccacttttgagaagcaggatgttgaatgtgagtaatgacacaacaggcctataaaatgcggactaaccctcggatgactcatccggtacaatgcagctactatttgtcaaggagactgaactcatactatgggggaaaccacttctcaggcagccagctggttctcaggtcagcaagagacgatccatttttatcggaagctttatagtagcaataatgctaatacccagcactcgggctccacaatgtagaggaaatggcatcgcctggcagtgacagctatattgtgcgtgtcaaggctgtggttatgaccagagatgactccagcgggggatggttcccacaggaaggaggcgggatcagtcgcgtcggggtctgtaaggtcatgcaccccgaaggcaatggacgaagcggctttctcatccatggtgaacgacagaaagacaaactggtggtattggaatgctatgtaagaaaggacttggtctacaccaaagccaatccaacgtttcatcactggaaggtcgataataggaagtttggacttactttccaaagccctgctgatgcccgagcctttgacaggggagtaaggaaagcaatcgaagaccttatagaaggttcaacaacgtcatcttccaccatccataatgaagctgagcttggcgatgatgacgtttttacaacagctacagacagttcttctaattcctctcagaagagagagcaacctactcggacaatctcctctcccacatcctgtgagcaccggaggatttataccctgggccacctccacgactcataccccacagaccactatcacctcgatcagccgatgccaaggccctaccgccaggtgagcttcccggacgacgacgaggagatcgtgcgcatcaacccccgggagaagatctggatgacggggtacgaggattaccggcacgcacccgtcaggggcaagtacccggacccctcggaggacgcggactcctcctacgtgcgcttcgccaagggcgaggtccccaagcatgactacaactacccctacgtggactcctcagactttggcctaggcgaggaccccaaaggccgcgggggcagcgtgatcaagacgcagccctcccggggcaagtcgcggcggcggaaggaggacggagagcgctcgcggtgcgtgtactgcagggacatgttcaaccacgaggagaaccgccggggccactgccaggacgcgcccgactccgtgagaacttgcatccgccgggtgagctgcatgtggtgcgcggacagcatgctctatcactgtatgtcggaccccgagggagactatacagacccttgctcgtgcgatactagcgacgagaagttttgcctccggtggatggctcttattgccttgtctttcctggccccctgtatgtgctgttacctgccccttcgggcctgctaccactgcggagtgatgtgcaggtgctgtggcgggaagcacaaagcggccgcgtgactcagtttccctcccttctccctccatccgcagccacaggggaactcgtctcttacatactctcatcttctcccccgctcccttccactccaaggagcgaggagggcaagcggcctcccagctccctggtacctcgaggcaccattccagccagggacgctgccgggtagactctccactccccctgccgcccacactgcagcagccacatccatacacacacgctcgcacagtgttctgaggaaggaaccttcgccacagactcctgtactattaacaatctgtaaccaagctaactgtctcatccatgtgttgatttcctgtttcctcctcccccgcctcttccagttcaaaggagtctgcaattggaactgctgattttcggtgggttttgtagttgatttttccaagagcgtcgaagactctctttctcttggttcaccttgcctgtcgctagcaagcatctggttcagcggaaatgggatgtgagaatgatgaaacccgacagaagtatctcagcctgcagtcagttattatgtataggaggtgagctagttaacaaacttgtaccacaaaacaatatcgctttaacttttctaaagccaaatttcccatgtaagctgcagtttctatctttagcccatcatcattttctgcccccccaaaatctgttgaaatgattcactgatgcaaaacattcacccgtaatagactgagaattgagccttaacttcagattaacttgtgagaatcaggaaaattccttcaactgcattgcatcctcttggaccagggctagaatggggatttcaggtttctatgagcctccccattacccctaaagtagaacattttttaaattgtgttgccaccacttctaaaaatttagcaatattagaataggatactagtgaagtaagaaattttgcttgttgttttgcaaaccaaatagtttcctcaaacacaaatcagtgttcccacgaacaagttccagttgagaaacactaaggttatggtgaataaaaccatagggagcttcttccccccaacccctggctattttatattaatggggagaggggatttttaaatgtcataaatttgaagagtggtgggttgcattttcttcatgggtttatgttttcgtttcattttggactcaatttcacatcaccaaattcctcatttatacttggggaaaaaacaaggccatatgtaaaaacccttccaatgcctaagtgtctttctcctgcaactccaaacccagactcgccactttgggtgcacaggtggttaggtcagccaactggttctgcctgtcgccttgccacggaggaggcttctaattagctggaaaagagtatttttctaatacgttgcaaggattagccaaatcttcttattgaagaaagaagaaaagtgaagagtggttacctatacctagcatagtacaatcagaacctcgtggagaccaccggggacaggcttgcggacgccggctgttcttcccgccacgatctttctgtggtagcggccagcagaagacatggcctgctccccactccctttccccactccttctttattgcacacaggacaccagtcttcaaggaaagggacttttttccagtctgccaatcatattgggaaagtgctagctgtgctcaccttcatggggctgtttccagctcgtccacaagctcatcgattttctttagtagattaccggtgtaaatacccagtgtgcttatgagtcagttagtagacgtcttcattcattggagtaactggtttaggctttccagtttggaaaaggagcagagagctgtccatctggattgatggaagaaaagagaacctcatccatgcctggagaacatctagaaaaccttcagccagcctccagtgctgtcgagagaccaccttcccccgacccggaggcacttccttggggtctttctctagggtctcttctctacaaagcacaacactaatgttcgtttccttagacctcagttcaagtgcccctatttatttcaataagaacgcacatatcccagctgttttttgtttgtcacctctatttagttgttacctgtttctctcttctttcaccccttgtccttttccacccttttaagagttacgctagcagatcttactccacgtatactttttggtttgtgaaggcatcggttaagggcacaaagacagccatggggacatttatgtaaatacgtctctaattgccacactgcagctgaacagtgtgtagtattttcccagtcagctttgccatactgacgtcaatcatttgagagaaattattcagattttatttttgtatctgtggtaacaaaacattaaccaaaagattttctgtccagaagcctccccgaccccccaagctatttgctcacattaacaaattaaagtgcctgaagcataattcattctttacctgtatactaaaaaccctgttgtattgatttttttataataagcctttttacctctgtgtaaaaaatatatatacaagtgtatgatgtacattttagttcttaacttttttttatggtttctaatatgtatgaccaatgtagccattgctttaaaatgtaccgtgtaaatataaacacatcctatcagaaaagaaaaaatcnagaacgaa

SEQ ID NO: 1708 - protein, 415 aa, Homo sapien
MASPGSDSYIVRVKAVVMTRDDSSGGWFPQEGGGISRVGVCKVMHPEGNGRSGFLIHGERQKDKLVVLECYVRKDLVYTKANPTFHHWKVDNRKFGLTFQSPADARAFDRGVRKAIEDLIEGSTTSSSTIHNEAELGDDDVFTTATDSSSNSSQKREQPTRTISSPTSCEHRRIYTLGHLHDSYPTDHYHLDQPMPRPYRQVSFPDDDEEIVRINPREKIWMTGYEDYRHAPVRGKYPDPSEDADSSYVRFAKGEVPKHDYNYPYVDSSDFGLGEDPKGRGGSVIKTQPSRGKSRRRKEDGERSRCVYCRDMFNHEENRRGHCQDAPDSVRTCIRRVSCMWCADSMLYHCMSDPEGDYTDPCSCDTSDEKFCLRWMALIALSFLAPCMCCYLPLRACYHCGVMCRCCGGKHKAAA

SEQ ID NO: 1709 - DNA, 2199 bp, Homo sapien
gggggtatttcctgaaagatgctaatctatttgccaaacttggtcttgaatgtactgggggcttcaaggtatgggtatatttttcttgtgtccttgcagttagcccccatgtcttatgtgtgtcctgaaaaaataagagcctgcccaagactttgggcctcttgacagaattaaccacttttatacatctgagttctcttggtaagttctttagcagtgttcaaagtctactagctcgcattagtttctgttgctgccaacagatctgaactaatgctaacagatccccctgagggattcttgatgggctgagcagctggctggagctagtactgactgacattcattgtgatgagggcagctttctggtacaggattctaagctctatgttttctatacattttcatctgtacttgcacctcactttacacaagaggaaactatgcaaagttagctggatcgctcaaggtcacttaggtgagttggcaagtccatgcttcccactcagctcctcaggtcagcaagtctacttctctgcctattttgtatactctctttaatatgtgcctagctttggaaagtctagaatgggtccctggtgcctttttactttgaagaaatcagtttctgcctctttttggaaaagaaaacaaagtgcaattgttttttactggaaagttacccaatagcatgaggtgaacaggacgtagttaggccttcctgtaaacagaaaatcatatcaaaacactatcttcccatctgtttctcaatgcctgctacttcttgtagatatttcatttcaggagagcagcagttaaacccgtggattttgtagttaggaacctgggttcaaaccctcttccactaattggctatgtctctggacaagtttttttttttttttttttttaaaccctttctgaactttcactttctatgtctacctcaaagaattgttgtgaggcttgagataatgcatttgtaaagggtctgccagataggaagatgctagttatggatttacaaggttgttaaggctgtaagagtctaaaacctacagtgaatcacaatgcatttacccccactgacttggacataagtgaaaactagccagaagtctctttttcaaattacttacaggttattcaatataaaatttttgtaatggataatcttatttatctaaactaaagcttcctgtttatacacactcctgttattctgggataagataaatgaccacagcaccttaatttctaggtgggtgcctgtgatggttcattgtaggtaaggacattttctctttttcagcagctgtgtaggtccagagcctctgggagaggaggggggtagcatgcacccagcaggggactgaactgggaaactcaaggttctttttactgtggggtagtgagctgcctttctgtgatcggtttccctagggatgttgctgttcccctccttgctattcgcagctacatacaacgtggccaaccccagtaggctgatcctatatatgatcagtgctggtgctgactctcaatagccccacccaagctggctataggtttacagatacattaattaggcaacctaaaatattgatgctggtgttggtgtgacataatgctatggccagaactgaaacttagagttataattcatgtattagggttctccagagggacagaattagtaggatatatgtatatatgaaagggaggttattagggagaactggctcccacagttagaaggcgaagtcgcacaataggccgtctgcaagctgggttagagagaagccagtagtggctcagcctgagttcaaaaacctcaaaactggggaagctgacagtgcagccagccttcagtctgtggccaaaggcccaagagcccctggcaaccaacccactggtgcaagtcctagattccaaaggctgaagatcctggagtctgatgtccaagagcaggaagagtggaagaaagccagaagactcagcaaacaaggtagacagagtctaccaccacagtggccataccaaagaggctaccgattccttcctgctacctggatccctgaagttgccctggtctctgcaccttctaaacctagttcttaagagctttccattacatgagctgtctcaaagccctccaataaattctcagtgtaagcttcaaaaaaaaaaaaaaaaaaa

SEQ ID NO: 1710 - protein, 33 aa, Homo sapien
MLLFPSLLFAATYNVANPSRLILYMISAGADSQ

SEQ ID NO: 1711 - DNA, 4994 bp, Homo sapien
ccgcagcgctcggctggctgcagcggcaccgcgggttgcgcggccggggatgctccagcgggcgcgatggcccccgccatgcagccggccgagatccaatttgcccagcggctggcgtccagcgagaagggcatccgggaccgagcggtgaagaagctgcgccagtacatcagcgtgaagacgcagagggagacaggaggtttcagtcaggaagaacttctacaggaagagctcgccaacaccattgcacagctagtccatgctgttaacaactcagcggctcaacacctgttcattcagaccttttggcaaaccatgaatcgagaatggaaaggaatagacaggctacgcctggacaaatactatatgctgattcgtctggtcctgaggcagtcctttgaagtcttgaagcgaaatggctgggaagaaagccgaatcaaggttttcttggatgtcctgatgaaggaggtcctgtgtcctgagagtcagtctcctaatggagtgagattccacttcattgatatttacctggatgaactctccaaagtcggggggaaggagcttttagcagatcagaatctcaagtttatcgatccattctgcaaaattgctgcaaagacgaaggaccacaccctggtacagaccatagctcggggtgtcttcgaagctatcgtagatcagtctccttttgtgcctgaagagacgatggaggaacagaagacaaaagtgggtgatggtgacctctctgctgaggagatacctgaaaatgaggtatccttgagaagagctgtcagtaaaaagaagacagcactgggcaaaaaccattccagaaaagatggactcagtgatgaaagaggaagagatgactgtggaacctttgaggacacagggccccttctccagtttgactataaggctgttgctgatcgactcctggaaatgaccagcaggaagaacacgccccacttcaacaggaagcgcctctccaaactcatcaagaaattccaagacctttctgaaggaagcagtatatctcaactcagttttgcggaggacatttctgctgatgaagatgaccaaatcctcagtcaaggaaagcataagaagaaaggaaataaacttttagagaaaactaacttggaaaaggagaaaggaagcagagtcttttgtgtagaggaagaggacagtgaaagcagtcttcaaaagagaagaaggaagaagaagaagaagcaccacctgcagcctgaaaatccaggcccagggggtgcagccccgtccctggaacagaaccggggcagggagcccgaggcctctgggccgaaagccctgaaggcacgtgtggccgagccaggtgcagaggccacgtccagcactggggaggagagtggctccgagcatcctccagccgtccccatgcacaataaaaggaaacggccacggaagaagagcccgagggcccacagggaaatgttggaatcagcagtgttgcccccagaggacatgtctcagagtggcccgagtggcagtcatcctcagggacctagagggtccccgacaggtggagcccaactcctaaaaaggaagcggaaacttggagttgtgcccgtcaatggcagtggcctgtccacgccggcctggcctccattgcagcaggaaggccctcccacaggccccgcagagggggcgaacagccacaccacgctgccccagcgcaggaggctgcagaaaaagaaggcagggcccggcagcctggagctctgtggcctgcccagccagaaaacagcaagtttgaaaaagaggaagaaaatgagagtgatgtcaaacttggtggagcacaacggggtgctggagtccgaagctgggcaaccccaggctctgggaagcagtgggacttgcagttccctgaagaagcagaagctgagggcagagagcgactttgtgaagtttgacacccccttcttaccaaagcccctgttcttcagaagagccaagagcagcactgccacccaccctccaggccctgccgtccagctaaacaagacaccatccagctccaagaaagtcacctttgggctgaacagaaacatgactgccgaattcaagaagacagacaagagtatcttggtcagtcccacgggcccttctcgagtggccttcgaccctgaacagaagcccctccacggggtgctgaagacccccaccagctcacctgccagctcacccctggtggccaagaagcccctgaccaccacaccaaggagaaggcccagggctatggatttcttctgaggagcagcagagtcccttgtaaaagactgcttttgtacagaatgcgctataaattatacctttaagaatgtggggccttttttatgattttgtaagttcccataagttgtgtgcacgaggttctgagagtgcccgcaggctgctgcgtcctggcccctctgtagtggctgcgggcgtcttggttgaatcttttgctacaaaccatgtttgcgtttgagctctccaggattttacatttttgggtaacctcagtgattcccattggtgtaggaaatgagaccctctctgaagctgaggagagcacgttgatctgaactttaaatcaatcagtgctgctggcacaatgaaaggtggaactgcacttgtgttgagctctcagttctgcggaatttggtactcattaccgtattcgccgtactaagttggtttctgttagtcttaacagtctgttttcttttaaaagcatgtagggcttcattgccatgttctgtgggtgtttggcaggttaccgatggggaagattcttgtcacagaatcagcaataccatagtttttctacatgtgctcagctgggggtgtggacaggtaggggtggggaaagaagaggctctgcgttctgggggctttttcttctcctccccctacccggtttccctccctgttttcctacctctacggcaagcccaaagtgtcttcccgggagcccagcgcagcccccggctcttacccaggaccccgccccgtgctgagccttctgctgaggtccttgcgtggagcacactcattcctccaagcccttgcgctcccgtttctctctctctccgtccacgttccagccgagtcactgcctgcctgaccggctccatggcagctccccatcttccctagaggctgcctgcgcatctggagcctgcgctccggctcagcgacctttcctctcaaatgcggaagcgtgcacttacagttcagaccgttctcctgtaagttcattacaaacacgggcggaaggcactcaggctttcgttggagaaacagaaataaggccttcttttgagcagcgattgctggatcattgatctgtttgaggaagtgtctgacctgggcctgagagctggagaaggtgcagattcaaagtgagcggctcctgaggagagccgccaaggctgctcgccttctccgtggcttccgcagctaccgtctgcacggtgagagggcacgggcacacggttcgggctggcgtgcagctctcccagccagccacgctctgctcaggcctggaagtgaaagccgcctccttcccgttatgccccccatacaggagcctcggtttttcagcaaaacgcggccagtccccttctccactgctgcctcccagcagagggccccaggatctccaaggtcccagctatggctttggacaacgtggcttcggcccctggggttgcagagcttgcattgggtttacctcggtctcattcattcatggagccaagggtggggtttcacctgcgaacatcagactgacttgctggcgtcaagagcagttgactcactgatgaaggccctggtgaggagaaagcactctgttcttcgcctactctgtaatcgttttgtcataatgagccatgaaaaaagtaatgaacttgtgctgttaatcgtcactgtaatgagaagtcttacgtacaacatagctgtggtggctgcgtggtttaatggctgcattagataggatcctcacatcccattcagaaccaaaactgatacagtgaaacaattaaggtgagcaaatagttttaacttttcttttttttttaagtttcattcttcctagaatatttttctaacaatttttatttcagctttaaagatgggtcatatagccaaacgggccatataatccaacattgttgagatgtcttaggacatctaaggcaaaactggcacatttgttctgcagactattgcaggaatgttttttcctagcatttctatattatctgtccattctgaggaaccagtgaatgtcctataaatgcacctcctgtcaaaaccatgcctgagaggtcccggctgggagtgacagggtgcttcttagattctattggtccttctctcattctccgaacttactcctttttatgggtaagtcaactaggtttacagtcccttatttttaatgcctaagttttgacagcaggaagaaaacaattttttaaaaattctcattacatagacgcacaagaatatgtcacataaagaaaatgtgtttagaatactggttttctatttacgcatgatattttcctaagtaaaattgccaagtggacttggaagtccagaaaggaaaataatttaaattaatgctggtgatcttaacaatattttgtaaaatgatgcttcccccttctccatggtctagtcaattttgtacaattaggtatctgactttacaagtttgttatcctttctaatttttactgaactgaaagcacaaagaagactacacagaaaatctggaaacagttgcaggtgttgggaggaagatgaaatcgagctgtcttttaacttttgtatgtgttttatcagaatttgctggactatgctggcaaggactttgtttacgatcaaattgtactagtgtctgcagggtttgtcagtactcgtcaaagccaagtccaattaaaaaaaaaaagtctttgccctcc

SEQ ID NO: 1712 - protein, 762 aa, Homo sapien
PQRSAGCSGTAGCAAGDAPAGAMAPAMQPAEIQFAQRLASSEKGIRDRAVKKLRQYISVKTQRETGGFSQEELLQEELANTIAQLVHAVNNSAAQHLFIQTFWQTMNREWKGIDRLRLDKYYMLIRLVLRQSFEVLKRNGWEESRIKVFLDVLMKEVLCPESQSPNGVRFHFIDIYLDELSKVGGKELLADQNLKFIDPFCKIAAKTKDHTLVQTIARGVFEAIVDQSPFVPEETMEEQKTKVGDGDLSAEEIPENEVSLRRAVSKKKTALGKNHSRKDGLSDERGRDDCGTFEDTGPLLQFDYKAVADRLLEMTSRKNTPHFNRKRLSKLIKKFQDLSEGSSISQLSFAEDISADEDDQILSQGKHKKKGNKLLEKTNLEKEKGSRVFCVEEEDSESSLQKRRRKKKKKHHLQPENPGPGGAAPSLEQNRGREPEASGPKALKARVAEPGAEATSSTGEESGSEHPPAVPMHNKRKRPRKKSPRAHREMLESAVLPPEDMSQSGPSGSHPQGPRGSPTGGAQLLKRKRKLGVVPVNGSGLSTPAWPPLQQEGPPTGPAEGANSHTTLPQRRRLQKKKAGPGSLELCGLPSQKTASLKKRKKMRVMSNLVEHNGVLESEAGQPQALGSSGTCSSLKKQKLRAESDFVKFDTPFLPKPLFFRRAKSSTATHPPGPAVQLNKTPSSSKKVTFGLNRNMTAEFKKTDKSILVSPTGPSRVAFDPEQKPLHGVLKTPTSSPASSPLVAKKPLTTTPRRRPRAMDFF

SEQ ID NO: 1713 - DNA, 5595 bp, Homo sapien
gtcgccagcaaccgagcggggcccggcccgagcggggcctgggggtgcgacgccgagggcgggggagagcgcgccgctgctcccggaccgggccgcgcacgccgcctcaggaaccatcactgttgctggaggcacctgacaaatcctagcgaatttttggagcatctccacccaggaacctcgccatccagaagtgtgcttcccgcacagctgcagccatggggtctgaggaccacggcgcccagaaccccagctgtaaaatcatgacgtttcgcccaaccatggaagaatttaaagacttcaacaaatacgtggcctacatagagtcgcagggagcccaccgggcgggcctggccaagatcatccccccgaaggagtggaagccgcggcagacgtatgatgacatcgacgacgtggtgatcccggcgcccatccagcaggtggtgacgggccagtcgggcctcttcacgcagtacaatatccagaagaaggccatgacagtgggcgagtaccgccgcctggccaacagcgagaagtactgtaccccgcggcaccaggactttgacgaccttgaacgcaaatactggaagaacctcacctttgtctccccgatctacggggctgacatcagcggctctttgtatgatgacgacgtggcccagtggaacatcgggagcctccggaccatcctggacatggtggagcgcgagtgcggcaccatcatcgagggcgtgaacacgccctacctgtacttcggcatgtggaagaccaccttcgcctggcacaccgaggacatggacctgtacagcatcaactacctgcactttggggagcctaagtcctggtacgccatcccaccagagcacggcaagcgcctggagcggctggccatcggcttcttccccgggagctcgcagggctgcgacgccttcctgcggcataagatgaccctcatctcgcccatcatcctgaagaagtacgggatccccttcagccggatcacgcaggaggccggggaattcatgatcacatttccctacggctaccacgccggcttcaatcacgggttcaactgcgcagaatctaccaacttcgccaccctgcggtggattgactacggcaaagtggccactcagtgcacgtgccggaaggacatggtcaagatctccatggacgtgttcgtgcgcatcctgcagcccgagcgctacgagctgtggaagcagggcaaggacctcacggtgctggaccacacgcggcccacggcgctcaccagccccgagctgagctcctggagtgcgtcccgggcctcgctgaaggccaagctcctccgcaggtctcaccggaaacggagccagcccaagaagccgaagcccgaagaccccaagttccctggggagggtacggctggggcagcgctcctagaggaggctgggggcagcgtgaaggaggaggctgggccggaggttgaccccgaggaggaggaggaggagccgcagccactgccacacggccgggaggccgagggcgcagaagaggacgggaggggcaagctgcggccaaccaaggccaagagcgagcggaagaagaagagcttcggcctgctgcccccacagctgccgcccccgcctgctcacttcccctcagaggaggcgctgtggctgccatccccactggagcccccggtgctgggcccaggccctgcagccatggaggagagccccctgccggcaccccttaatgtcgtgccccctgaggtgcccagtgaggagctagaggccaagcctcggcccatcatccccatgctgtacgtggtgccgcggccgggcaaggcagccttcaaccaggagcacgtgtcctgccagcaggcctttgagcactttgcccagaagggtccgacctggaaggaaccagtttcccccatggagctgacggggccagaggacggtgcagccagcagtggggcaggtcgcatggagaccaaagcccgggccggagaggggcaggcaccgtccacattttccaaattgaagatggagatcaagaagagccggcgccatcccctgggccggccgcccacccggtccccactgtcggtggtgaagcaggaggcctcaagtgacgaggaggcatcccctttctccggggaggaagatgtgagtgacccggacgccttgaggccgctgctgtctctgcagtggaagaacagggcggccagcttccaggccgagaggaagttcaacgcagcggctgcgcgcacggagccctactgcgccatctgcacgctcttctacccctactgccaggccctacagactgagaaggaggcacccatagcctccctcggagagggctgcccggccacattaccctccaaaagccgtcagaagacccgaccgctcatccctgagatgtgcttcacctctggcggtgagaacacggagccgctgcctgccaactcctacatcggcgacgacgggaccagccccctgatcgcctgcggcaagtgctgcctgcaggtccatgccagttgctatggcatccgtcccgagctggtcaatgaaggctggacgtgttcccggtgcgcggcccacgcctggactgcggagtgctgcctgtgcaacctgcgaggaggtgcgctgcagatgaccaccgataggaggtggatccacgtgatctgtgccatcgcagtccccgaggcgcgcttcctgaacgtgattgagcgccaccctgtggacatcagcgccatccccgagcagcggtggaagctgaaatgcgtgtactgccggaagcggatgaagaaggtgtcaggtgcctgtatccagtgctcctacgagcactgctccacgtccttccacgtgacctgcgcccacgccgcaggcgtgctcatggagccggacgactggccctatgtggtctccatcacctgcctcaagcacaagtcggggggtcacgctgtccaactcctgagggccgtgtccctaggccaggtggtcatcaccaagaaccgcaacgggctgtactaccgctgtcgcgtcatcggtgccgcctcgcagacctgctacgaagtgaacttcgacgatggctcctacagcgacaacctgtaccctgagagcatcacgagtagggactgtgtccagctgggacccccttccgagggggagctggtggagctccggtggactgacggcaacctctacaaggccaagttcatctcctccgtcaccagccacatctaccaggtggagtttgaggacgggtcccagctgacggtgaagcgtggggacatcttcaccctggaggaggagctgcccaagagggtccgctctcggctgtcactgagcacgggggcaccgcaggagcccgccttctcgggggaggaggccaaggccgccaagcgcccgcgtgtgggcaccccgcttgccacggaggactccgggcggagccaggactacgtggccttcgtggagagcctcctgcaggtgcagggccggcccggagcccccttctaggacagctggccgctcaggcgaccctcagcccggcggggaggccatggcatgccccgggcgttcgcttgctgtgaattcctgtcctcgtgtccccgacccccgagaggccacctccaagccgcgggtgccccctagggcgacaggagccagcgggacgccgcacgcggccccagactcagggagcagggccaggcgggctcgggggccggccaggggagcaccccactcaactactcagaattttaaaccatgtaagctctcttcttctcgaaaaggtgctactgcaatgccctactgagcaacctttgagattgtcacttctgtacataaaccacctttgtgaggctctttctataaatacatattgtttaaaaaaaagcaagaaaaaaaggaaaacaaaggaaaatatccccaaagttgttttctagatttgtggctttaagaaaaaacaaaacaaaacaaacacattgtttttctcagaaccaggattctctgagaggtcagagcatctcgctgtttttttgttgttgttttaaaatattatgatttggctacagaccaggcagggaaagagacccggtaattggagggtgagcctcggggggggggcaggacgccccggtttcggcacagcccggtcactcacggcctcgctctcgcctcaccccggctcctgggctttgatggtctggtgccagtgcctgtgcccactctgtgcctgctgggaggaggcccaggctctctggtggccgcccctgtgcacctggccaggggaagcccgggggtctggggcctccctccgtctgcgcccacctttgcagaataaactctctcctggggtttgtctatctttgtttctctcacccgagagaaacgcaggtgttccagaggcttccttgcagacaaagcacccctgcacctcccatggctcaggatgagggaggcccccaggcccttctggttggtagtgagtgtggacagcttcccagctcttcgggtacaaccctgagcaggtcgggggacacagggccgaggcaggccttcggggcccctttcgcctgcttccgggcagggacgaggcctggtgtcctcgctccacccacccacgctgctgtcacctgaggggaatctgcttcttaggagtgggttgagctgatagagaaaaaacggccttcagcccaggctgggaagcgccttctccaggtgcctctccctcaccagctctgcacccctctggggagccttccccaccttagctgtctcctgccccagggagggatggaggagataatttgcttatattaaaaacaaaaaatggctgaggcaggagtttgggaccagcctgggctatatagcaagaccccatcactacaaattttttacaaattagctaggtgtggtggtgcgcacctgtggtcccagctactcgggaggctgtggtgggaggattgcttgagtccaggaggttgaggctgcagtcagctcagattgcaccactgcactccagcctgggcaacagagcgagaccctgtctccaaaaaaaaaaaaaaagcaatgtttatattataaaagagtgtcctaacagtccccgggctagagaggactaaggaaaacagagagagtgttacgcaggagcaagcctttcatttccttggtgggggaggggggcggttgccctggagagggccggggtcggggaggttggggggtgtcagccaaaacgtggaggtgtccctctgcacgcagccctcgcccggcgtggcgctgacactgtattcttatgttgtttgaaaatgctatttatattgtaaagaagcgggcgggtgcccctgctgcccttgtcccttgggggtcacacccatcccctggtgggctcctgggcggcctgcgcagatgggccacagaagggcaggccggagctgcacactctccccacgaaggtatctctgtgtcttactctgtgcaaagacgcggcaaaacccagtgccctggtttttccccacccgagatgaaggatacgctgtattttttgcctaatgtccctgcctctaggttcataatgaattaaaggttcatgaacgctgcg

SEQ ID NO: 1714 - protein, 1119 aa, Homo sapien
RIFGASPPRNLAIQKCASRTAAAMGSEDHGAQNPSCKIMTFRPTMEEFKDFNKYVAYIESQGAHRAGLAKIIPPKEWKPRQTYDDIDDVVIPAPIQQVVTGQSGLFTQYNIQKKAMTVGEYRRLANSEKYCTPRHQDFDDLERKYWKNLTFVSPIYGADISGSLYDDDVAQWNIGSLRTILDMVERECGTIIEGVNTPYLYFGMWKTTFAWHTEDMDLYSINYLHFGEPKSWYAIPPEHGKRLERLAIGFFPGSSQGCDAFLRHKMTLISPIILKKYGIPFSRITQEAGEFMITFPYGYHAGFNHGFNCAESTNFATLRWIDYGKVATQCTCRKDMVKISMDVFVRILQPERYELWKQGKDLTVLDHTRPTALTSPELSSWSASRASLKAKLLRRSHRKRSQPKKPKPEDPKFPGEGTAGAALLEEAGGSVKEEAGPEVDPEEEEEEPQPLPHGREAEGAEEDGRGKLRPTKAKSERKKKSFGLLPPQLPPPPAHFPSEEALWLPSPLEPPVLGPGPAAMEESPLPAPLNVVPPEVPSEELEAKPRPIIPMLYVVPRPGKAAFNQEHVSCQQAFEHFAQKGPTWKEPVSPMELTGPEDGAASSGAGRMETKARAGEGQAPSTFSKLKMEIKKSRRHPLGRPPTRSPLSVVKQEASSDEEASPFSGEEDVSDPDALRPLLSLQWKNRAASFQAERKFNAAAARTEPYCAICTLFYPYCQALQTEKEAPIASLGEGCPATLPSKSRQKTRPLIPEMCFTSGGENTEPLPANSYIGDDGTSPLIACGKCCLQVHASCYGIRPELVNEGWTCSRCAAHAWTAECCLCNLRGGALQMTTDRRWIHVICAIAVPEARFLNVIERHPVDISAIPEQRWKLKCVYCRKRMKKVSGACIQCSYEHCSTSFHVTCAHAAGVLMEPDDWPYVVSITCLKHKSGGHAVQLLRAVSLGQVVITKNRNGLYYRCRVIGAASQTCYEVNFDDGSYSDNLYPESITSRDCVQLGPPSEGELVELRWTDGNLYKAKFISSVTSHIYQVEFEDGSQLTVKRGDIFTLEEELPKRVRSRLSLSTGAPQEPAFSGEEAKAAKRPRVGTPLATEDSGRSQDYVAFVESLLQVQGRPGAPF

SEQ ID NO: 1715 - DNA, 3766 bp, Homo sapien
cggcaccgtcgtaggtgcgggccgcatgaatggagcgccgggcgtaaggcaaagcctggcaccgtctgcgcggccgctatctgctcccggagcgtgagtgcggggtgtggggcgtgcgcgtgcgcgctcagagggggctcaaggcgagcgcgccgggcagttgcgggcgcgtggctgctgaggttggcggcggtgccgcgcgcccgacgggccggtggttgcggggcctcccgcctcgacccgggctgggggcagccgtggcgggcgccggggaccgcaaggggcggaggaaaggagggggccggtcccggcacgcagaggagcagccgaccatgccccgagacaacatggcctccttgatccaacggatcgcccgccaggcttgcctcaccttccggggcagcgggggcggccgcggcgcttccgatcgcgacgcggcttctggcgcggaggcgccgatgcagccgggcttccccgagaacctgagcaagctgaagagcctcctgacccagctccgcgccgaggacttgaacatcgccccgcgcaaggccacactgcagccgctgccgcccaacctgccgccagtcacctacatgcacatctacgagacggacggcttcagcctgggcgtgttcctgctcaagagcggcacgtccatcccgctgcacgaccacccgggcatgcacggcatgctcaaggtgctgtacggcaccgtgcgcatcagctgcatggacaagctagacgcgggcggcgggcaacggccgcgggccttgccgcccgagcagcagttcgagccgccgctgcagccccgggagcgagaagccgtgcggccgggcgtgctgcgttcgcgggccgagtacaccgaggccagcggcccctgcatcctcacaccgcaccgggacaacctgcaccagatcgacgccgtggaagggcctgccgccttcctggacatcctggccccgccctacgacccggacgatggccgggactgccactattaccgggtgctggagccggtcaggcccaaggaggcctccagctcggcctgtgacctgcctcgagaggtgtggctcctggagaccccacaggccgatgacttctggtgcgagggagaaccctatccaggtcccaaggtcttcccttgaagccactggcgcccaggagcggtgggccgaagacgtgccctaccctaccacaagggctgtgtctctaccccctagcctgggcgttggatctactggaatgagcagcagccgcttcctcggcagccttgggaagcacgggcgactggacagcagccgccgggcacggttatgggggcggggtgggcggggaggctagattgtttcctggtactgtcactgccactggggctttgatttggaggaatggggcaggggactatctgaagcgcttccatcctaaagccataatgaaaatatcttcctctcttccccattctatacaaaatactaagtggttttcttgctcccactccctaccccttagttaaatagggtttattttccactcatgcccttatgcctttttttcttatagttttttaacttattgactgtgcatgacccagtggtttgaattgtttttagttcaagtcattggtaaaaactaggtttaaggagatgagctactgtttaaagtgagctggcctgcctaattaattccttgtgaaaactaaatgattttttcagtttggggatcattctcacaacataactatgcatgtagaggacaagatttattttcttttctccctttgcccagtagccacatctggtttactcaggcagcatctactaagaaattcagcacctgcatatctctgtgacatggtcacttagagcttatcttccctatgaatctccagatctgtgagtcgagcagatttcatgttgcagattcacctttaatgcaaagactgtattatcctcacatgactttttttcttgtcttactgtaccttaaaaggtgatagagtaattctgtattttctaacgggaagattcaaaggagctgaatgtgttatgcttccaaacaactgaatgtaaaacactcctagccagttgttgcattccctatatttatttacttccaatattttactgtaaaagtagggagaaatattatgttgatagttgtttcatattctctcaggaactttaatgttcccgactcgggtgattccagctgtgttgctggcagtgttgtctcaaccctctccctaaaatgactgagccctgggttcatctaatgtggttttccttaggaagagatagaaggcacagaagatcacagctagagaattgagaattaactatactactagccattttagggcaccaaaacttgggattaaacacttcctacttcccactcccaactcctgaaatgaagtcttgctatctgtgactagttttatttttgtgcttttaatagtccgagcagtcttaccttgtttacacatgtattgacaccatttgcttcaggccatggagcactgtttctccctttttactatttataggattccgttttttcacaagacttttaataaaaagaaattgtagaaataaacacattaaaatttgcccagctgtcgtctaagccctcttgattgacttgcccaagtggcaatagagttctaatatctataataaagggagatttgctattattagtggaatgttgaccccgtatgtagagaaacagtacgtgcctttgcctctttatgcacacagagacccagggtgagggagtatttgttcccagtttttaagatagtataaaaaagcaaatacttggtgagtgatttaaaaataaaaccaaaacaaaacacaaaaagatattccacaggacatgccactttattataaaacctgacacaggcatagtaccaagtatttcctgcattgttgctaaaattgttttattgtagctccacattctggtgtagtttaaaatgcctttgggggcagtttgaagcagttcttcatgccacttagtttgaaaataaaattctagatatgcaaatgattttcttagaaaacttcacaaaataaaagatcttgtttttttttccatagcacagtaatgaatgtggttatcaatcacatacttttttggattatattgtagcaaaaagttgattagcttaccaagattattaatagcaatgtatgtgttataatacaacttagtacattaaagctacgaaaactcatcctggctgtaggatagtaataaaggaagaattatgacttcattatgaaaaaaagaagttttaaagttttcaattacgagcaatttggaagaaaaaacctaaggtgcttttcaaaagagtaactgaaattgttgcaggccaaaacagcaatatgatatctcagatttagttcaataagaacagtgaaacttttggttcactaataaattctgagtaaattagtggtgaagacaaaatataacttgttttagtgagccactgaggaaagaatatgcttattacaaagacaaaatgtggtgcagaaactatcttgcacctgtgtgcataaactgttagtcgtgactgacttggtgtgttgctattgtgtttctatatactccgtccaatatagataatgttttaataacaactgtgggataaaagttatcttccccttggaaagactaatgagcacaatgatattaatcacttttatggtgaataataaatgcaataattgcctcatgggtgagaaattgtctgtcc

SEQ ID NO: 1716 - protein, 270 aa, Homo sapien [sequence omitted]

SEQ ID NO: 1717 - DNA, 2513 bp, Homo sapien
gggggagagggggctcaaggcgagcgcgccgggcagttgcgggcgcgtggctgctgaggttggcggcggtgccgcgcgcccgacgggccggtggttgcggggcctcccgcctcgacccgggctgggggcagccgtggcggccgccggggaccgcaaggggcggaggaaaggagggggccggtcccggcacgcagaggagcagccgaccatgccccgagacaacatggcctccttgatccaacggatcgcccgccaggcttgcctcaccttccggggcagctggggcggccgcggcgcttccgatcgcgacgcggcttctggcgcggaggcgccgatgcagccgggcttccccgagaacctgagcaagctgaagagcctcctgacccagctccgcgccgaggacttgaacatcgccccgcgcaaggccacactgcagccgctgccgcccaacctgccgccagtcacctacatgcacatctacgagacggacggcttcagcctgggcgtgttcctgctcaagagcggcacgtccatcccgctgcacgaccacccgggcatgcacggcatgctcaaggtgctgtacggcaccgtgcgcatcagctgcatggacaagctagacgcgggcggcgggcaacggccgcgggccttgccgcccgagcagcagttcgagccgccgctgcagccccgggagcgagaagccgtgcggccgggcgtgctgcgttcgcgggccgagtacaccgaggccagcggcccctgcatcctcacaccgcaccgggacaacctgcaccagatcgacgccgtggaagggcctgccgccttcctggacatcctggccccgccctacgacccggacgatggccgggactgccactattaccgggtgctggagccggtcaggcccaaggaggcctccagctcggcctgtgacctgcctcgagaggtgtggctcctggagaccccacaggccgatgacttctggtgcgagggagaaccctatccaggtcccaaggtcttcccttgaagccactggcgcccaggagcggtgggccgaagacgtgccctaccctaccacaagggctgtgtctctaccccctagcctgggcgttggatctactggaatgagcagcagccgcttcctcggcagccttgggaagcacgggcgactggacagcagccgccgggcacggttatgggggcggggtgggcggggaggctagattgtttcctggtactgtcactgccactggggctttgatttggaggaatggggcaggggactatctgaagcgcttccatcctaaagccataatgaaaatatcttcctctcttccccattctatacaaaatactaagtggttttcttgctcccactccctaccccttagttaaatagggtttattttccactcatgcccttatgcctttttttcttatagttttttaacttattgactgtgcatgacccagtggtttgaattgtttttagttcaagtcattggtaaaaactaggtttaaggagatgagctactgtttaaagtgagctggcctgcctaattaattccttgtgaaaactaaatgattttttcagtttggggatcattctcacaacataactatgcatgtagaggacaagatttattttctttcctccctttgcccagtagccacatctggtttactcaggcagcatctactaagaaattcagcacctgcatatctctgtgacatggtcacttagagcttatcttccctatgaatctccagatctgtgagtcgagcagatttcatgttgcagattcacctttaatgcaaagactgtattatcctcacatgactttttttcttgtcttactgtaccttaaaaggtgatagagtaattctgtattttctaacgggaagattcaaaggagctgaatgtgttatgcttccaaacaactgaatgtaaaacactcctagccagttgttgcattccctatatttatttacttccaatattttactgtaaaagtagggagaaatattatgttgatagttgtttcatattctctcaggaactttaatgttcccgactcgggtgattccagctgtgttgctggcagtgttgtctcaaccctctccctaaaatgactgagccctgggttcatctaatgtggttttccttaggaagagatagaaggcacagaagatcacagctagagaattgagaattaactatactactagccattttagggcaccaaaacttgggattaaacacttcctacttcccactcccaactcctgaaatgaagtcttgctatctgtgactagttttatttttgtgcttttaatagtccgagcagtcttaccttgtttacacatgtattgacaccatttgcttcaggccatggagcactgtttctcccttttttactatttataggattccgttttttcacaagacttttaataaaaagaaattgtagaaataaacacattaaaataaaaaaaaaaaaaaaaaaaaaaaaaaaaaa

SEQ ID NO: 1718 - protein, 228 aa, Homo sapien
MQPGFPENLSKLKSLLTQLRAEDLNIAPRKATLQPLPPNLPPVTYMHIYETDGFSLGVFLLKSGTSIPLHDHPGMHGMLKVLYGTVRISCMDKLDAGGGQRPRALPPEQQFEPPLQPREREAVRPGVLRSRAEYTEASGPCILTPHRDNLHQIDAVEGPAAFLDILAPPYDPDDGRDCHYYRVLEPVRPKEASSSACDLPREVWLLETPQADDFWCEGEPYPGPKVFP

SEQ ID NO: 1719 - DNA, 921 bp, Homo sapien
ccggtagcgggtgtgggggcgcgagcagcgcagggcggcctctcccccacccctcagcccgggcccgggctcggtcccccctctccctccgcttcgcactcccgtcgggtacgggaaggtccaagccgctgccgggtgcccgagggccgtcgtggccgccgtcgccacgggtcccaatggagccgccgaatctctatccggtgaagctctacgtgtacgacctgtccaaaggcctggcccggcggctcagccccatcatgctggggaaacaactggaaggcatctggcacacatccatagttgtgcacaaggatgagttcttcttcggcagtggtggtatctccagctgccccccgggagggacattgcttgggcctccagactctgtggttgatgtggggagtacagaagtcacagaagaaatctttctggagtacctctcctccctgggggagtccctgttccgaggtgaggcctacaacctctttgaacacaattgtaacaccttcagcaacgaagtggcacagttcctgactgggcggaagattccttcttacatcacagacctgccctctgaagttctctccacgccctttggacaggcacttcggcccctcctggactccattcagatccagcctccaggagggagctccgtgggcagacccaacggccagagctaacaggactgcctgggaccgccctgcctcaccagggcttttcctttttaaacaaaacaaaccctaccagatttctattttataattttacatcagagctaacaaccaggggacggctttttaaatttcccagggaaggagaccgtcaggccgcatgtagacaatgctgctaagaaacagaacaaaatgccaccccttctaatagtattatactaatttattaaaaaaaaaaaaaaaaaaa

SEQ ID NO: 1720 - protein, 226 aa, Homo sapien
GSGCGGASSAGRPLPHPSARARARSPLSLRFALPSGTGRSKPLPGARGPSWPPSPRVPMEPPNLYPVKLYVYDLSKGLARRLSPIMLGKQLEGIWHTSIVVHKDEFFFGSGGISSCPPGGTLLGPPDSVVDVGSTEVTEEIFLEYLSSLGESLFRGEAYNLFEHNCNTFSNEVAQFLTGRKIPSYITDLPSEVLSTPFGQALRPLLDSIQIQPPGGSSVGRPNGQS

SEQ ID NO: 1721 - DNA, 2970 bp, Homo sapien
gagcgcgcgggcgctactagccgcgggggccaggcgcctggcttcttactgcggcttcatactgagggcccagccgaggcggcgcgggtgcaggagcaggacttacggcagtgggggctgacagggattcacctacgctcttaccagctggagggagtaaactggctcgcccagcgcttccattgtcagaatggctgtatcctgggagatgagatgggcctggggaagacctgccagactattgctctcttcatttatttggcaggaagattaaatgatgaagggccatttctgattctttgtcccttgtctgttttgagcaactggaaagaagaaatgcagagatttgctccaggtctttcctgtgtaacatatgcaggcgacaaggaggaaagagcctgccttcagcaagacctgaaacaggagtcacgttttcatgtgctactgactacctatgagatttgcttgaaagatgcatcatttctaaaatcattcccttggagtgttcttgttgtggatgaagctcacaggttgaaaaaccaaagctccctgctgcataagaccttgtcagagttctcagtagtcttcagtctcctgttgaccggaactcccatccagaacagcctccaagagctctactccctcctcagttttgtggagcctgatctcttttccaaggaagaggtgggagattttattcaacgctaccaggatattgagaaagaatctgagtcagcaagtgaactgcacaaactcttgcagccatttctgctgaggcgagtgaaagctgaggtagctacagagcttcccaagaagacagaagtagtgatataccatggcatgtcagcattgcagaagaaatactacaaggccattttgatgaaagacctagatgcatttgaaaatgagacggcaaagaaagttaaactacagaacattttgtcccagcttcgaaagtgtgtggatcacccatatttgtttgatggtgtggagccggagccttttgaagttggagaccacctgactgaggctagtgggaagcttcacctgctggataagctactagcattcctgtattctgggggccatcgggttttacttttctcccaaatgacccagatgttggatattctccaagactatatggattacagaggctacagctatgagcgtgtggatggttctgtgagaggagaagagagacacttggccattaagaactttggacagcagcccattttcgtttttctcctgagtactagggcaggtggagttggcatgaacttaacagcagcagatactgtgatttttgttgacagtgactttaatcctcagaatgacttgcaagcagctgccagggctcatcgcattggccaaaacaagtctgttaaagttattcggctgattggtcgagacactgtggaagaaatagtctataggaaagcagcctccaaactgcagctcaccaacatgatcatagaaggaggccattttactctgggagcccaaaaacccgctgccgatgctgacctccagttgagtgagatactcaaatttggtttggataaactgctggcctctgaggggagcaccatggatgaaatagacctggagtccatcctgggagaaacaaaagatggccagtgggtctctgatgccttgcctgcagcagaaggagggagcagagatcaagaggaaggaaaaaatcatatgtacttatttgaaggtaaagattattctaaagagcccagtaaggaagacagaaaatcatttgaacaactggtaaaccttcagaaaacccttttggagaaagctagtcaagagggccgatcactccgaaataaaggcagtgttctcatcccaggccttgtggagggatctaccaaaaggaagcgggttctgagtccagaagagctggaggacagacagaagaaaagacaagaagcagctgccaagagaaggagactcatagaggagaagaagaggcaaaaggaagaggctgaacataagaaaaagatggcctggtgggaatccaacaattaccagtccttctgcctgccctctgaggagagcgagccagaggaccttgagaatggggaagagagctctgctgagctggattaccaagacccagatgctacttccctcaagtacgttagtggtgatgtcacccaccctcaggctggggccgaggatgctctcattgtgcactgcgtagatgactgtggccactggggcagaggtggtttatttacagctctggaaaagcgatccgctgagccaagaaaaatatatgagctggctgggaaaatgaaagacctgagtttgggaggtgtccttttatttcctgttgatgataaagaatcaagaaacaaagggcaagatttgttggccttgattgtggctcagcatcgtgatcgttccaatgtcctgtctggcattaagatggcagccctagaagagggcctgaagaagatatttttagcagcaaaaaagaagaaagcaagtgttcatcttccacgtattggacatgccacgaaaggttttaactggtatggtactgagcgacttattcggaaacatctggctgcaagaggcatcccaacttacatatattattttcctagaagcaagtctgctgtccttcattcacagtcttcatcttcctcctcaagacagctggtgccttaagaattggcccagcctcagatcctgtctttagcaaccagctaatatttacccagaggtactgcaatagagtatttcaaaatggaatcaggatctggtgggcctcagaaattgtctcttttctgagtttcagtttggttctcctggatgttttgctctgttttggtacctgtaatatagggaaacacaactttttttgggaaagccctttgaccccagcttgctagttgcataataataaattttctgttcctaatggtaaaaaaaaaaaaaaaaaaaaaa

SEQ ID NO: 1722 - protein, 896 aa, Homo sapien
ERAGATSRGGQAPGFLLRLHTEGPAEAARVQEQDLRQWGLTGIHLRSYQLEGVNWLAQRFHCQNGCILGDEMGLGKTCQTIALFIYLAGRLNDEGPFLILCPLSVLSNWKEEMQRFAPGLSCVTYAGDKEERACLQQDLKQESRFHVLLTTYEICLKDASFLKSFPWSVLVVDEAHRLKNQSSLLHKTLSEFSVVFSLLLTGTPIQNSLQELYSLLSFVEPDLFSKEEVGDFIQRYQDIEKESESASELHKLLQPFLLRRVKAEVATELPKKTEVVIYHGMSALQKKYYKAILMKDLDAFENETAKKVKLQNILSQLRKCVDHPYLFDGVEPEPFEVGDHLTEASGKLHLLDKLLAFLYSGGHRVLLFSQMTQMLDILQDYMDYRGYSYERVDGSVRGEERHLAIKNFGQQPIFVFLLSTRAGGVGMNLTAADTVIFVDSDFNPQNDLQAAARAHRIGQNKSVKVIRLIGRDTVEEIVYRKAASKLQLTNMIIEGGHFTLGAQKPAADADLQLSEILKFGLDKLLASEGSTMDEIDLESILGETKDGQWVSDALPAAEGGSRDQEEGKNHMYLFEGKDYSKEPSKEDRKSFEQLVNLQKTLLEKASQEGRSLRNKGSVLIPGLVEGSTKRKRVLSPEELEDRQKKRQEAAAKRRRLIEEKKRQKEEAEHKKKMAWWESNNYQSFCLPSEESEPEDLENGEESSAELDYQDPDATSLKYVSGDVTHPQAGAEDALIVHCVDDCGHWGRGGLFTALEKRSAEPRKIYELAGKMKDLSLGGVLLFPVDDKESRNKGQDLLALIVAQHRDRSNVLSGIKMAALEEGLKKIFLAAKKKKASVHLPRIGHATKGFNWYGTERLIRKHLAARGIPTYIYYFPRSKSAVLHSQSSSSSSRQLVP

SEQ ID NO: 1723 - DNA, 2573 bp, Homo sapien
ggcacgaggctaccctttgctgccttaaacttgcttttctagatcctgatactggtaaactgactggcggatcatttaccatgaaataccatgatatgcctgacgttatagatttcctagtcttgagacaacaatttgatgatgcaaaatacaggcgatggaatataggtgaccgcttcaggtctgtcatagatgatgcctggtggtttggaacaatcgaaagccaggaacctcttcaacctgagtaccctgatagtctgtttcaatgctacaatgtttgctgggacaatggagatacagaaaagatgagtccttgggatatggagcttatacctaataatgctgtatttcctgaagaactaggtaccagtgttcctttaactgatggtgagtgcagatcactaatctataaacctcttgatggagaatggggtaccaatcccagggatgaagaatgtgaaagaattgtggcaggaataaaccagttgatgacactagatattgcctcagcatttgtggcccccgtggatctgcaagcctatcccatgtattgcacagtagtggcatatccaacggatctaagtacaattaaacaaagactggaaaacaggttttacaggcgggtttcttccctaatgtgggaagttcgatatatagagcataatacacgaacatttaatgagcctggaagccctattgtgaaatctgctaaattcgtgactgatcttcttctacattttataaaggatcagacttgttataacataattccactttataattcaatgaagaagaaagttttgtctgattctgaggatgaagagaaagatgctgatgtgccaggaacttctactcgaaaaaggaaggaccatcagcctagaagaagattacgtaatagagcccagtcttacgatattcaagcatggaagaaacagtgtgaagaattgttaaatctcatatttcaatgtgaagattcagagcctttccgtcagccggtagatctccttgaatatccagactacagagacatcattgacactccaatggattttgctaccgttagagaaactttagaggctgggaattatgagtcaccaatggagttatgtaaagatgtcagacttattttcagtaattccaaagcatatacaccaagcaaaagatcaaggatttacagcatgagtttgcgcttgtctgcattctttgaagaacacattagttcagttttatcagattataaatctgctcttcgttttcataaaagaaataccataaccaaaaggaggaagaaaagaaacagaagcagctctgtttccagtagtgctgcatcaagccctgaaaggaaaaaaaggatcttaaaaccccagctaaaatcagaaagctctacctctgcattctctacacctacacgatcaataccgccaagacacaatgctgctcagataaacggtaaaacagaatctagttctgtggttcgaaccagaagcaaccgagtggttgtagatccagttgtcactgagcaaccatctacttcttcagctgcaaagacttttattacaaaagctaatgcatctgcaataccagggaaaacaatactagagaattctgtgaaacattccaaagctttgaatactctttccagtcctggtcaatccagttttagtcatggcactaggaataattctgcaaaagaaaacatggaaaaggaaaagccagtcaaacgtaaaatgaagtcatctgtactcccaaaggcgtccactctttcaaagtcatcagctgtcattgagcaaggagattgtaagaacaacgctcttgtaccaggaaccattcaagtaaatggccatggaggacagccatcaaaacttgtgaagaggggacctggaaggaaacctaaagtagaagttaataccaatagtggtgaaattatacacaagaaaaggggtagaaagcccaaaaagctacagtatgcaaagccagaagatttagagcaaaataatgtgcatcccatcagagatgaagtacttccttcttcaacatgcaattttctttctgaaactaataatgtaaaggaagatttgttacagaaaaagaatcgtggaggtaggaagcccaaaaggaagatgaagacacaaaaattagatgcagatctcctagtccctgcaagtgtcaaagtgttaaggagaagtaaccgaaaaaagatagatgatcctatagatgaggaagaagagtttgaagaactcaaaggctctgaaccccacatgagaactagaaatcaaggtcgaaggacagctttctataatgaggatgactctgaagaggagcaaaggcagctgttgttcgaagacacctctttaacttttggaacttctagtagaggacgagtccgaaagttgactgaaaaagcaaaagctaatttaattggttggtaacttgtaccaaaatattttacttcaaaatctataaagcaggtacagttaaggaataagtagaactaaggcttctgcttccttgctgctgtggtggagtagggaatgttatgatttgatttgcaaaaaaaaaaaaaaaaaaaaaaa

SEQ ID NO: 1724 - protein, 707 aa, Homo sapien
MSPWDMELIPNNAVFPEELGTSVPLTDGECRSLIYKPLDGEWGTNPRDEECERIVAGINQLMTLDIASAFVAPVDLQAYPMYCTVVAYPTDLSTIKQRLENRFYRRVSSLMWEVRYIEHNTRTFNEPGSPIVKSAKFVTDLLLHFIKDQTCYNIIPLYNSMKKKVLSDSEDEEKDADVPGTSTRKRKDHQPRRRLRNRAQSYDIQAWKKQCEELLNLIFQCEDSEPFRQPVDLLEYPDYRDIIDTPMDFATVRETLEAGNYESPMELCKDVRLIFSNSKAYTPSKRSRIYSMSLRLSAFFEEHISSVLSDYKSALRFHKRNTITKRRKKRNRSSSVSSSAASSPERKKRILKPQLKSESSTSAFSTPTRSIPPRHNAAQINGKTESSSVVRTRSNRVVVDPVVTEQPSTSSAAKTFITKANASAIPGKTILENSVKHSKALNTLSSPGQSSFSHGTRNNSAKENMEKEKPVKRKMKSSVLPKASTLSKSSAVIEQGDCKNNALVPGTIQVNGHGGQPSKLVKRGPGRKPKVEVNTNSGEIIHKKRGRKPKKLQYAKPEDLEQNNVHPIRDEVLPSSTCNFLSETNNVKEDLLQKKNRGGRKPKRKMKTQKLDADLLVPASVKVLRRSNRKKIDDPIDEEEEFEELKGSEPHMRTRNQGRRTAFYNEDDSEEEQRQLLFEDTSLTFGTSSRGRVRKLTEKAKANLIGW

SEQ ID NO: 1725 - DNA, 1756 bp, Homo sapien
ggcacgagggcggacgggcggactgacgggcgcctccaccttgctccctccctggctgccggcttccttttgtctttctgggcggcgatgagcgcagggccggcgcagcagctgcgggcgcacggaggcccgcgctgctagtcactcctcccggcctcggcgcgcttgtcccgggcagcggcccgggcccgctgcagccgccgccggcgccgaacttgggctcgggaagccggcggaccgcgtcctgcgccggagcaggggcatggtctagtggcccagtcaggacgcggaaacactccctggaggttctgacccgctccctctcagcctccgcctggtctctggtgtagtcgccgccgccagccgccatgggcaaacagaacagcaagctgcggcccgaggtgctgcaggacctgcgggagaacacggagttcaccgaccacgagctgcaggagtggtacaagggcttcctcaaggactgccccaccggccacctgaccgtggacgagttcaagaagatctacgccaacttcttcccctacggcgacgcttccaagttcgccgagcacgtcttccgcaccttcgacaccaacggcgacggcaccatcgacttccgggagttcatcattgcgctgagcgtgacctcgcggggcaagctggagcagaagctcaagtgggccttcagcatgtacgacctggacggcaacggctacatcagccgcagcgagatgctggagatcgtgcaggccatctacaagatggtgtcgtctgtgatgaagatgccggaggatgagtccaccccggagaagcgcacagacaagatcttcaggcagatggacaccaacaatgacggcaaactgtccttggaagaattcatcagaggtgccaagagcgacccctccatcgtccgcctgctgcagtgcgaccccagcagtgccagtcagttctgagcgagcggcccctggacagttgcagagaaacacaggcttgtcgtgccgtttaagctttgcttgcaagagtggatgccccgcaatcgttcctgctctcccgggccccgggcctggggcatgcgttgcacctgcccggcccggtggctgcgcctccctcctccacctgaccaacgcgacattcctcccctcacgcctggcccggtcccttccagggcaactcccagggatgtggtgacatgcagggttcaagtgttcttggttccaggcacctcccggctcacggggagctcagaggtccatgccgaggagaccaggcaggacctcccgaggctgcgccccggccggcccatgcgttttgtgatcccaagtgactctgtgggaagggtggggacgaggcgtcgggagggtatacagggagcccctcccgtgcatggctgcccccccgttcattttctccaccacagccgcttgcacgtatagatactgtggtcccctttcttttaatatataaattatgtatggtgaagtggagtgtattgtgtaggtcccgtatttaatgcctctgactgcctttgaagcgcagccctctgtggcccgcagccccctgagcctggctgttgtgtggtatttatgctctctttgtctgcctgtttctaaggaaatgcatgtgtgccctgagccgtgatgatcctcccatccgtgttgtgagcacaggcatttgtgtctggtctgtcctccctgttgattggtctggcatttccggtattaaaatgataaaataaatggcaaaaaaaaaaaaaaaaaaa

SEQ ID NO: 1726 - protein, 193 aa, Homo sapien; identical to SEQ ID NO: 1043

SEQ ID NO: 1727 - DNA, 11043 bp, Homo sapien
  Unsure 6964-6995: Unknown base
ttgctgcgtcaactgtgttccctttggcctggctgagtttgatactgtggggattcagtttaggcgctggcccgaggatatcccagcggtggtacttcggagacacctgtctgcatctgactgagccggctctcctggcctcgcgctgcacattctctcctggcggcggcgccacctgcagtagcgttcgcccgaacatggcgacacggagcagcaggagggagtcgcgactcccgttcctattcaccctggtcgcactgctgccgcccggagctctctgcgaagtctggacgcagaggctgcacggcggcagcgcgcccttgccccaggaccggggcttcctcgtggtgcagggcgacccgcgcgagctgcggctgtgggcgcgcggggatgccaggggggcgagccgcgcggacgagaagccgctccggaggaaacggagcgctgccctgcagcccgagcccatcaaggtgtacggacaggttagtctgaatgattcccacaatcagatggtggtgcactgggctggagagaaaagcaacgtgatcgtggccttggcccgagatagcctggcattggcgaggcccaagagcagtgatgtgtacgtgtcttacgactatggaaaatcattcaagaaaatttcagacaagttaaactttggcttgggaaataggagtgaagctgttatcgcccagttctaccacagccctgcggacaacaagcggtacatctttgcagacgcttatgcccagtacctctggatcacgtttgacttctgcaacactcttcaaggcttttccatcccatttcgggcagctgatctcctcctacacagtaaggcctccaaccttctcttgggctttgacaggtcccaccccaacaagcagctgtggaagtcagatgactttggccagacctggatcatgattcaggaacatgtcaagtccttttcttggggaattgatccctatgacaaaccaaataccatctacattgaacgacacgaaccctctggctactccactgtcttccgaagtacagatttcttccagtcccgggaaaaccaggaagtgatccttgaggaagtgagagattttcagcttcgggacaagtacatgtttgctacaaaggtggtgcatctcttgggcagtgaacagcagtcttctgtccagctctgggtctcctttggccggaagcccatgagagcagcccagtttgtcacaagacatcctattaatgaatattacatcgcagatgcctccgaggaccaggtgtttgtgtgtgtcagccacagtaacaaccgcaccaatttatacatctcagaggcagaggggctgaagttctccctgtccttggagaacgtgctctattacagcccaggaggggccggcagtgacaccttggtgaggtattttgcaaatgaaccatttgctgacttccaccgagtggaaggattgcaaggagtctacattgctactctgattaatggttctatgaatgaggagaacatgagatcggtcatcacctttgacaaagggggaacctgggagtttcttcaggctccagccttcacgggatatggagagaaaatcaattgtgagctttcccagggctgttcccttcatctggctcagcgcctcagtcagctcctcaacctccagctccggagaatgcccatcctgtccaaggagtcggctccaggcctcatcatcgccactggctcagtgggaaagaacttggctagcaagacaaacgtgtacatctctagcagtgctggagccaggtggcgagaggcacttcctggacctcactactacacatggggagaccacggcggaatcatcacggccattgcccagggcatggaaaccaacgagctaaaatacagtaccaatgaaggggagacctggaaaacattcatcttctctgagaagccagtgtttgtgtatggcctcctcacagaacctggggagaagagcactgtcttcaccatctttggctcgaacaaagagaatgtccacagctggctgatcctccaggtcaatgccacggatgccttgggagttccctgcacagagaatgactacaagctgtggtcaccatctgatgagcgggggaatgagtgtttgctgggacacaagactgttttcaaacggcggaccccccatgccacatgcttcaatggagaggactttgacaggccggtggtcgtgtccaactgctcctgcacccgggaggactatgagtgtgacttcggtttcaagatgagtgaagatttgtcattagaggtttgtgttccagatccggaattttctggaaagtcatactcccctcctgtgccttgccctgtgggttctacttacaggagaacgagaggctaccggaagatttctggggacacttgtagcggaggagatgttgaagcgcgactggaaggagagctggtcccctgtcccctggcagaagagaacgagttcattctgtatgctgtgaggaaatccatctaccgctatgacctggcctcgggagccaccgagcagttgcctctcaccgggctacgggcagcagtggccctggactttgactatgagcacaactgtttgtattggtccgacctggccttggacgtcatccagcgcctctgtttgaatggaagcacagggcaagaggtgatcatcaattctggcctggagacagtagaagctttggcttttgaacccctcagccagctgctttactgggtagatgcaggcttcaaaaagattgaggtagctaatccagatggcgacttccgactcacaatcgtcaattcctctgtgcttgatcgtcccagggctctggtcctcgtgccccaagagggggtgatgttctggacagactggggagacctgaagcctgggatttatcggagcaatatggatggttctgctgcctatcacctggtgtctgaggatgtgaagtggcccaatggcatctctgtggacgaccagtggatttactggacggatgcctacctggagtgcatagagcggatcacgttcagtggccagcagcgctctgtcattctggacaacctcccgcacccctatgccattgctgtctttaagaatgaaatctactgggatgactggtcacagctcagcatattccgagcttccaaatacagtgggtcccagatggagattctggcaaaccagctcacggggctcatggacatgaagattttctacaaggggaagaacactggaagcaatgcctgtgtgcccaggccatgcagcctgctgtgcctgcccaaggccaacaacagtagaagctgcaggtgtccagaggatgtgtccagcagtgtgcttccatcaggggacctgatgtgtgactgccctcagggctatcagctcaagaacaatacctgtgtcaaagaagagaacacctgtcttcgcaaccagtatcgctgcagcaacgggaactgtatcaacagcatttggtggtgtgactttgacaacgactgtggagacatgagcgatgagagaaactgccctaccaccatctgtgacctggacacccagtttcgttgccaggagtctgggacttgtatcccactgtcctataaatgtgaccttgaggatgactgtggagacaacagtgatgaaagtcattgtgaaatgcaccagtgccggagtgacgagtacaactgcagttccggcatgtgcatccgctcctcctgggtatgtgacggggacaacgactgcagggactggtctgatgaagccaactgtaccgccatctatcacacctgtgaggcctccaacttccagtgccgaaacgggcactgcatcccccagcggtgggcgtgtgacggggatacggactgccaggatggttccgatgaggatccagtcaactgtgagaagaagtgcaatggattccgctgcccaaacggcacttgcatcccatccagcaaacattgtgatggtctgcgtgattgctctgatggctccgatgaacagcactgcgagcccctctgtacgcacttcatggactttgtgtgtaagaaccgccagcagtgcctgttccactccatggtctgtgacggaatcatccagtgccgcgacgggtccgatgaggatgcggcgtttgcaggatgctcccaagatcctgagttccacaaggtatgtgatgagttcggtttccagtgtcagaatggagtgtgcatcagtttgatttggaagtgcgacgggatggatgattgcggcgattattctgatgaagccaactgcgaaaaccccacagaagccccaaactgctcccgctacttccagtttcggtgtgagaatggccactgcatccccaacagatggaaatgtgacagggagaacgactgtggggactggtctgatgagaaggattgtggagattcacatattcttcccttctcgactcctgggccctccacgtgtctgcccaattactaccgctgcagcagtgggacctgcgtgatggacacctgggtgtgcgacgggtaccgagattgtgcagatggctctgacgaggaagcctgccccttgcttgcaaacgtcactgctgcctccactcccacccaacttgggcgatgtgaccgatttgagttcgaatgccaccaaccgaagacgtgtattcccaactggaagcgctgtgacggccaccaagattgccaggatggccgggacgaggccaattgccccacacacagcaccttgacttgcatgagcagggagttccagtgcgaggacggggaggcctgcattgtgctctcggagcgctgcgacggcttcctggactgctcggacgagagcgatgaaaaggcctgcagtgatgagttgactgtgtacaaagtacagaatcttcagtggacagctgacttctctggggatgtgactttgacctggatgaggcccaaaaaaatgccctctgcatcttgtgtatataatgtctactacagggtggttggagagagcatatggaagactctggagacccacagcaataagacaaacactgtattaaaagtcttgaaaccagataccacgtatcaggttaaagtacaggttcagtgtctcagcaaggcacacaacaccaatgactttgtgaccctgaggaccccagagggattgccagatgcccctcgaaatctccagctgtcactccccagggaagcagaaggtgtgattgtaggccactgggctcctcccatccacacccatggcctcatccgtgagtacattgtagaatacagcaggagtggttccaagatgtgggcctcccagagggctgctagtaactttacagaaatcaagaacttattggtcaacactctatacaccgtcagagtggctgcggtgactagtcgtggaataggaaactggagcgattctaaatccattaccaccataaaaggaaaagtgatcccaccaccagatatccacattgacagctatggtgaaaattatctaagcttcaccctgaccatggagagtgatatcaaggtgaatggctatgtggtgaaccttttctgggcatttgacacccacaagcaagagaggagaactttgaacttccgaggaagcatattgtcacacaaagttggcaatctgacagctcatacatcctatgagatttctgcctgggccaagactgacttgggggatagccctctggcatttgagcatgttatgaccagaggggttcgcccacctgcacctagcctcaaggccaaagccatcaaccagactgcagtggaatgtacctggaccggcccccggaatgtggtttatggtattttctatgccacgtcctttcttgacctctatcgcaacccgaagagcttgactacttcactccacaacaagacggtcattgtcagtaaggatgagcagtatttgtttctggtccgtgtagtggtaccctaccaggggccatcctctgactacgttgtagtgaagatgatcccggacagcaggcttccaccccgtcacctgcatgtggttcatacgggcaaaacctccgtggtcatcaagtgggaatcaccgtatgactctcctgaccaggacttgttgtatgcaattgcagtcaaagatctcataagaaagactgacaggagctacaaagtaaaatcccgtaacagcactgtggaatacacccttaacaagttggagcctggcgggaaataccacatcattgtccaactggggaacatgagcaaagattccagcataaaaattaccacagtttcattatcagcacctgatgccttaaaaatcataacagaaaatgatcatgttcttctgttttggaaaagcctggctttaaaggaaaagcattttaatgaaagcaggggctatgagatacacatgtttgatagtgccatgaatatcacagcttaccttgggaatactactgacaatttctttaaaatttccaacctgaagatgggtcataattacacgttcaccgtccaagcaagatgcctttttggcaaccagatctgtggggagcctgccatcctgctgtacgatgagctggggtctggtgcagatgcatctgcaacgcaggctgccagatctacggatgttgctgctgtggtggtgcccatcttattcctgatactgctgagcctgggggtggggtttgccatcctgtacacgaagcaccggaggctgcagagcagcttcaccgccttcgccaacagccactacagctccaggctggggtccgcaatcttctcctctggggatgacctgggggaagatgatgaagatgcccctatgataactggattttcagatgacgtccccatggtgatagcctgaaagagctttcctcactagaaaccaaatggtgtaaatattttatttgataaagatagttgatggtttattttaaaagatgcactttgagttgcaatatgttatttttatatgggccaaaaacnnnnnnnnnnnnnnnnnnnnnnnnnnnnnnnnggaatgaataaactttgtagtaatcaactgtgaacttcaaaccaggttgattttagtaacccaattgctttgatttgacattaatgtagtcttacagggctgtgcttgctgggcatgcttttacgtctgtgagataatttcggttcagtaaattggccaatctttttatttttctaagacacagaaatgtatttaataaaaacctcgagagagtgatgggtggaaccccttctccttgaaagtgtgtacagatattccattttgtttggatatagtttataggaaagtgtgtggatgtattatggcggaaggtttctttatgttattttgttaatttattgggactctgtgtaaggccaggctttagtggtcattagacaccacatgtgttatgagccccttacccatagggttgggggtgggaagagaagcatatttttttgccattccggaagcaatccatttttattcacttgtgtgtcatgtaatggtctttggcaggagagagcactgagtcattgctggagttcagttcaacagagctgcagcttgggaagccctgtaagcccacagcttcctctcttatattaattgatggaattttactgtatgtgcctctgtacaagatgtagctttgagagctacaaaatgataacactgctttattacacactggtttcattgtcattgcaaaaacttaccctggttgtgggggagagttctagatctgtgccatgatccatacactggctaatagagtacataatttttccattttccattttttgtttttacttactactgaaggatctcagatgtaaaattatgtatttggtttgagatggccacttattgtccttaaaaatccatactgatatatgcagtcattttgaattggacagtgccttctctttttttttctcctcttcttccatctccctcacccatgcccccacccaatctaaagagacagtgctgtacattctcatagagatagagaagatctaaaaagttgagactactcaatccagttaacaacagcaggagcactagagtttgttcatttattctctctgtaaaacaagctgtgctttttttcttctgcctttaaaatgccacccgtgtattcaaaccatggccacttgatacttatgtagaatccatcgtgggctgatgcaagccctttatttaggcttagtgttgtgggcaccaatgtcgagcatcgttgtgacttgtgctgtatgattctcactgaagaatttcctttcagccaagaagcagtgaggtctgggaatattccaaagtcatgtctctgaatatgtgtccttgacgtgcaagctttgtaaaaccccatccccgcttaggtgcgaggcatcaccttctcacaagtgtttagtttcttttaaccacaagtatcattcttgggtgataatatagtttcattctacttagggattgtttagaaaacaaagaaagagccaattaaattttttagtttttgaaatttttatttatatgtatacttagatgagtattttaagctgtcgacctttagtttgccatacgggtaggactgtatttcatgttaacaactggtggtaatgataagccttcttctagcgtattttctcttctttcctgtcactttcctaagtttttttttttaaagactggaattttttttggctttatcttgtcttaccgtagagatttgttcaaaactctaagccctaccacctcccctttaataagctctttaaatagttgaatcattaacaacctggtgggaggcaagtcatttaattgaaccactaggaagtgtattttcttttctttttctgccaactttttggtggcatttgtaaaagctgatataaaaggctctgagatgttattttcagttattccataggcaagcctttttacagagcatatgtctccagttggcagcttgagatatttccgagcatccggttctagctaccagtgcctcccaatgcttagtgcacagtactgtagactggccatcacccctctccttggaaaatgccactgtgctgtttgaaaaaaagcagccttttagggctagagtattttatataaacagaagagctaagttcctgaagactaagctagatagctgcagctatatgtaaattgtatatttttatgaacttttgaagcacacactcctgtttccctctgtgtagctttgtggggatttcatgtatatatgctgtctgaaagaatccagaggttggagtgccaatagaaaatgaaaacaaatgccttgtactacaggcagcctctgaaggtgaccacataactgtcttcactgtgaccaatcggagtccctgcttgcttgtgaagaaggggcttttgtaccttgttggagatgccacctcagaagttcacactgtgcaggaaaaaggttttattctctcctggcatacattagaatgtcagatgcctgcatccatgtggaccacgatgggcctctaaaaattggtgggcagggggtttgcttatgagttttctctggaaaccgattttactcctggatgtattgaatgccccttgagctttatgagatacgagtccacatggataaaatgttagagagtggagttctacagaggattccaggaagaggccatgtctgtgcagtcctagttccagacaggtgagaagctccaggaactactggctaccttgacaagctgggtaaatagttatcattctgggtaactggttgaaactctgacttttggacaagtaattcctggggttctgtctttggtagcatcaccagggatatttgggtgggacagacagaagacacacagctgcctgttctctcctgcccatcatgtttggcccactagatgaagctgtactcagcaatttagggaatgtaacccttctcagaactggccattttcaggggaagcttgggagagcaatagtatggtgagccccttagagatgagcgcctactccttcttggcgaatgctgccttcagatgcttaccaagtggtcactgcatctagtaagattatatttccagtacacttccttagggcagaaacaccatcctatcaggtttggtcagtcccttcttcatgaagggagtcatggggaattcctgaaaattttcttccttctgcagacagttggatgagtcccttagagaaggcatccagagacataactaaactgaatatcatcccatattgattttaggaattgactctaaaactctgtgcagaatcttgtgttgggattgtatcttgacattcctgttgtgttatttttcttaactggagtgtgtgctgcctttcaggtacaatttttgtgtaataaaagccagtgcattaagtttatatagactactttctatgcaagactgagatatggaatagataggaagagatatgtactgctgggtacatggacagtaagtgtgttttcagatggagtaccagcaccgaaaatgggttgagggaggatgggttgtatgtatgtttctgcccactaattttgagcagccatattatgaattaaatcgtcacagccaagtaataacccaagaatggtatgagtttcatgtgtaatagctcaaatggaataagcatgaatgctggagtggaccattatcctcaaatattctatgtcacttctcatttaaagactcttgttatgaactattagaaactttaggcaaaatcaaaagtatttgcggcaaaataaaggcctattctactcttatttaaagtgaaacactgtatacttgtttctctccaaagcgaaattaagtatttataatttcaattgcctcgataagtttccaagtcactgaaatctgctgaaggttttactgtattgttgcacaactttaagataatttttgtctcaatgtcaacttttttcactgaataaaaatttaactgggtcaagaaaacacctctttgaaaatccactgtctctgtgtgtctcgagctgttctttagagcgcaataaagatggctgacgcagtctccaaacccc

SEQ ID NO: 1728 - protein, 2279 aa, Homo sapien [sequence omitted]

SEQ ID NO: 1729 - DNA, 2583 bp, Homo sapien
cgagtgacctcgcgatctggcccggctcccgctcgtcgcaacagcgtgactacagggtatggcggggtccgggcactgtgcggctggacccccagttctggggccacgccgcggaaccgcttactgctgcagcttttggggtcgcccggccgccgctattacagtcttcccccgcatcagaaggttccattgccttctctttcccccacaatgcaggcaggcaccatagcccgttggaaaaaaaaagagggggacaaaatcaatgaaggtgacctaattgcagaggttgaaactgataaagccactgttggatttgagagcctggaggagtgttatatggcaaagatacttgttgctgaaggtaccagggatgttcccatcggagcgatcatctgtatcacagttggcaagcctgaggatattgaggcctttaaaaattatacactggattcctcagcagcacctaccccacaagcggccccagcaccaacccctgctgccactgcttcgccacctacaccttctgctcaggctcctggtagctcatatccccctcacatgcaggtacttcttcctgccctctctcccaccatgaccatgggcacagttcagagatgggaaaaaaaagtgggtgagaagctaagtgaaggagacttactggcagagatagaaactgacaaagccactataggttttgaagtacaggaagaaggttatctggcaaaaatcctggtccctgaaggcacaagagatgtccctctaggaaccccactctgtatcattgtagaaaaagaggcagatatatcagcatttgctgactataggccaaccgaagtaacagatttaaaaccacaagtgccaccacctaccccacccccggtggccgctgttcctccaactccccagcctttagctcctacaccttcagcaccctgcccagctactcctgctggaccaaagggaagggtgtttgttagccctcttgcaaagaagttggcagtagagaaagggattgatcttacacaagtaaaagggacaggaccagatggtagaatcaccaagaaggatatcgactcttttgtgcctagtaaagttgctcctgctccggcagctgttgtgcctcccacaggtcctggaatggcaccagttcctacaggtgtcttcacagatatcccaatcagcaacattcgtcgggttattgcacagcgattaatgcaatcaaagcaaaccatacctcattattacctttctatcgatgtaaatatgggagaagttttgttggtacggaaagaacttaataagatattagaagggagaagcaaaatttctgtcaatgacttcatcataaaagcttcagctttggcatgtttaaaagttcccgaagcaaattcttcttggatggacacagttataagacaaaatcatgttgttgatgtcagtgttgcggtcagtactcctgcaggactcatcacacctattgtgtttaatgcacatataaaaggagtggaaaccattgctaatgatgttgtttctttagcaaccaaagcaagagagggtaaactacagccacatgaattccagggtggcacttttacgatctccaatttaggaatgtttggaattaagaatttctctgctattattaacccacctcaagcatgtattttggcaattggtgcttcagaggataaactggtccctgcagataatgaaaaagggtttgatgtggctagcatgatgtctgttacactcagttgtgatcaccgggtggtggatggagcagttggagcccagtggcttgctgagtttagaaagtaccttgaaaaacctatcactatgttgttgtaactaactcaagaatttctaaactctcccaggtcacactgattcattcttaacaagatatttatatgttattaaacaggtggttgctttttattttaaccagttatttttattattgagtctgctcagataagttatttataatgggcattactgaatttttaaaatgccgattacacccaaatattgtgcacatttaataatcagacaccagatttttagctctgtactcctaattaagggacatgtatgtggccttgcctagccctttggtgataagtacttcctctaggaaatgtacgataggtagaattgtggttccctaaagacaagtacataaaggtgaccctgatgaaaccttgaagttctgaaatttaactgcctaaaatgttctccttagatgtgagagaaagagaaatcagaaaaattaattctcttgggggaagggcttgaattgaagctttactttagaatttagccctggtttgaaattttccattacatgatcttggtttatcatcgatgggaagggtagaaaacttcaaggaaaataagtgaaattttaaaagtcagcattttcttagacctcttcagctgattgtttatttttctatgaattctgtactcaaaattacacatttgtttaaataaatatccacacaaattctcagttacatcaagtagctggtttatatttagattatctcaagtaggggggaataaccatgtgtaggaatt

SEQ ID NO: 1730 - DNA, 5003 bp, Homo sapien
gaggaaaaacagtacagatgggccaagagcttcaaggagaagtagttataataattacagatcagtacggaaatcagattcaagcattttcaccaagttctttatcttctttgtcaattgctggggttggacttgatagctcaaatttgaaaacaacctttcaggaaaacacacagagtataagtgtaagaggcatcaaatttattccaggtcctcctggaaataaggatctttgttttacttggcgtgagttttctgactttattcgagtgcaactaatttctggacctcctgctaaacttctccttatagactggccagaactaaaggagtccattccagtgattaatggaagagatttacagaaccctattattgttcaactttgtgatcagtgggataatccagcaccggtacaacatgttaaaataagtcttacaaaagctagcaatttaaagctcatgccttcaaaccaacagcataaaacagatgagaaaggcagggctaatttgggagtattcagtgtttttgcccctaggggagagcatactcttcaggttaaagccatctataacaaaagtatcatagaaggacctataattaagttaatgattcttccagacccagaaaaacccgttcgtctcaatgttaaatatgacaaagatgcatccttcttagcagggggtcttttcactgattttatgattagtgttatttctgaagatgacagtatcattaaaaacattaatccagcacgtatttccatgaaaatgtggaagctgtctaccagtgggaaccgacccccagcaaatgcagaaacatttagttgtaataaaataaaagataatgacaaagaagatggctgcttctatttcagggataaagtaattcctaataaagtggggacatattgtatccagtttggttttatgatggataaaacaaatattctcaacagtgaacaggttatagttgaagtcctgcctaatcaacctgtgaagttagtacctaaaattaaaccacctacaccagctgtttcaaatgttcgctcagttgccagtaggaccttggtcagagatctacatcttagtatcacggatgactacgacaaccatactggaattgatttggttggcactataatagccaccattaaaggctctaatgaggaagatactgataccccactttttattgggaaagttagaacacttgaattccccttcgtgaatggttcggctgaaatcatgagtctggtgctggcagaaagtagtcctggaagggatagtactgaatattttattgtatttgagccccggctaccacttttatcaagaaccttagaaccatatatcctaccgttcatgttttacaatgatgttaagaagcagcaacaaatggcagcacttacaaaagaaaaggaccaattatctcagtctattgttatgtataaaagtttatttgaagccagccaacagcttcttaatgaaatgaaatgtcaagttgaagaagcaagattaaaagaggcccaattgcgaaatgaactaaaaatacataatattgacattcctacaacacaacaggtgccacacattgaagcacttctgaaaagaaagctatcagaacaagaagaactgaagaaaaaacctagaagatcgtgtactcttccaaactatactaaaggcagtggagatgttttgggaaagattgcacatctagcacaaattgaagatgatagagctgcgatggttatttcttggcatctggcaagtgacatggactgtgtagtcaccctaaccactgacgctgcacgtcgtatctatgatgaaacccaaggtcgtcagcaggtgttgccccttgattctatttacaagaagactcttccagattggaaaagatctctacctcatttccgaaatggaaaattgtattttaaacccattggagatccagtctttgctcgagacttgttaacatttccagataatgtagaacattgtgaaacagtatttggtatgctgttaggagacaccattattttggataatctggatgcggccaatcattatagaaaagaggttgttaaaattacacactgtcctacactgctgaccagagatggagatcgaattcgaagtaatggaaagtttgggggccttcagaataaagctcctccaatggataaacttcggggaatggtatttggagctccagttccaaaacagtgtctgatcttaggggaacaaatagatcttcttcagcagtatcgttctgctgtgtgcaaactagacagtgtgaataaggatcttaacagtcaattagagtaccttcgcactccggatatgaggaagaaaaagcaagaacttgatgaacatgagaaaaatctcaaactaatagaggaaaaactaggtatgactcccatacgtaagtgtaatgactcattgcgtcattcaccaaaggttgagacgacagattgtccagttcctcctaaaagaatgagacgagaagctacaagacaaaataggattataaccaaaacagatgtatgagaggtgacagagagaagaggccattggtctcagtaagaatgccctgctttctgcatctctgtttcagaagaccaagagggtgacttaccagactgagtatttctggggacaatacaagtacctgggcatgaatttccatttcgattcagatgggactggaaacaaccattcaattttatgaatcttactggacattatggatttactggaattattccagacattatgccctttggttgtcactaccttgcaaatgtgtaagaggaaaatgtgctaatgtggcagtgactgtaaaactggcacatggcatttattaatcctgaagaaaagtacatgtactatttttcagtataaatataatgaacatgtcagaactatttcttgaaaacctttttattacttttgcgtgaatttatttaacaaagatgttttgtcttttgtgtaagggaggttctagaggctagatgtttaattgtaaatatgtgaggaaactcaatgcagaattcaggataaaaattttaaaagcacaggtatttgggaattgaaatgttaagatacccagaacaacattaaatcaatgagtgaacttgtgacagtggtagcatttcaaatttcaaaagacttatcctgtgtgtgtgtgtgtgtgtatatatatatatatatataaatatatatatataaaatattcagcagcaccaagttttataactattgtttgtttgactttattaatactagaatatgtagtctcagccttaattttacatttacattattttgtaattttttattactatttttaaggggttaaagagaacatacattctcacattagtgtactttctggtagaaagttgctgcaaaaacatttgaaatgtatattaacctaatgtatgtcatatatatgtctttgtgtaagttcaagactattgatctgtgaagttattttgtaaggacatacatttggtaagtaagtttgtgtcccaggaaatgtatgtgtttttaaaccctttctaaatatgcaggccattaataaataagattgtttcttccctactgaatagataagtgtttttcttttttaaaattggaagcttcataaaagttatcttgttaaaaaacgatgatgatgttaacctatctttataattggaaattatttaaactgtttgttgttacagaagaaacaaaatggtaattacagaattagctgtggggaagattggctcccatggtactacaggttgagtatcccttattcaaaatggttgggacctgaagtgttttggattttggttttttgtggggtttttaaattattattttggaatatttgcattatatttaccaatttagcatccctaatccaaaaatctttcattagaaattggaaatgcttcaatgagcatttcccttatgtgtcatatctgcgctcaaatgttttgaattttggaacatttcttgtttctgacttttagattagggatactcaccccgtaccaatatttggagtccttagacattagattatatgaaaatgattgattgataggtaagaaaggttaaagagaaatgactttttaggaactagacttgaacgtataattaatatgtggaactagtttgcttttataattcattgtatcaagaaggagtcatgttttaaatccaaggcattgagactatctagaagcaaaaaagttggttttaaaaattctttttattagaagtgtgtttaaaaacatgtctttttttcccttgagcgacagtggcctcactacattgcccaggctagtcttgaactcctgggttcaagcagtcttcctgccttggcctcctaagtagcagggattacaggcatgcacccacatgccaatttttattgcttaaaatggcgagttctatggatattatctagccccaagcccatatctgtacacttttgttcattttataataccagaaagaatgttctatcagtaaaagaaggttttaagtatgaatctccatttttgtggagtttttctaccctgtaaaaattaactttgtggttcccagtaattacagtaaggagtttttctatattttcacagttggatttatctaaggatatttctcagcatattaaggaatccttttctacatttgagcaaatactgaggttcatgttgtaccaaataataataaattgcttttgtgtttaatatgtaacacgtaagaacaattgaaattttcttctaagatttaatactagtcttttagtataaaggaatgtaactggagaaaaaaattaatgctacagccatttatcctgtgttatgtgttatataatctgaaatttgtcacaatgttacaatcaggaagttttttttctggtttcttcttccaaaggaaaataatagcctacttgtattttgaagtaactgaaataaaactctctccaagcctttttgc

SEQ ID NO: 1731 - protein, 848 aa, Homo sapien
GKTVQMGQELQGEVVIIITDQYGNQIQAFSPSSLSSLSIAGVGLDSSNLKTTFQENTQSISVRGIKFIPGPPGNKDLCFTWREFSDFIRVQLISGPPAKLLLIDWPELKESIPVINGRDLQNPIIVQLCDQWDNPAPVQHVKISLTKASNLKLMPSNQQHKTDEKGRANLGVFSVFAPRGEHTLQVKAIYNKSIIEGPIIKLMILPDPEKPVRLNVKYDKDASFLAGGLFTDFMISVISEDDSIIKNINPARISMKMWKLSTSGNRPPANAETFSCNKIKDNDKEDGCFYFRDKVIPNKVGTYCIQFGFMMDKTNILNSEQVIVEVLPNQPVKLVPKIKPPTPAVSNVRSVASRTLVRDLHLSITDDYDNHTGIDLVGTIIATIKGSNEEDTDTPLFIGKVRTLEFPFVNGSAEIMSLVLAESSPGRDSTEYFIVFEPRLPLLSRTLEPYILPFMFYNDVKKQQQMAALTKEKDQLSQSIVMYKSLFEASQQLLNEMKCQVEEARLKEAQLRNELKIHNIDIPTTQQVPHIEALLKRKLSEQEELKKKPRRSCTLPNYTKGSGDVLGKIAHLAQIEDDRAAMVISWHLASDMDCVVTLTTDAARRIYDETQGRQQVLPLDSIYKKTLPDWKRSLPHFRNGKLYFKPIGDPVFARDLLTFPDNVEHCETVFGMLLGDTIILDNLDAANHYRKEVVKITHCPTLLTRDGDRIRSNGKFGGLQNKAPPMDKLRGMVFGAPVPKQCLILGEQIDLLQQYRSAVCKLDSVNKDLNSQLEYLRTPDMRKKKQELDEHEKNLKLIEEKLGMTPIRKCNDSLRHSPKVETTDCPVPPKRMRREATRQNRIITKTDV

SEQ ID NO: 1732 - DNA, 4882 bp, Homo sapien
agaggaggaaattgttcctcgtctgataagacaacagtggagaaaggacgcatgctgtttcttagggacacggctgacttccagatatgaccatgtatttgtggcttaaactcttggcatttggctttgcctttctggacacagaagtatttgtgacagggcaaagcccaacaccttcccccactggattgactacagcaaagatgcccagtgttccactttcaagtgaccccttacctactcacaccactgcattctcacccgcaagcacctttgaaagagaaaatgacttctcagagaccacaacttctcttagtccagacaatacttccacccaagtatccccggactctttggataatgctagtgcttttaataccacaggtgtttcatcagtacagacgcctcaccttcccacgcacgcagactcgcagacgccctctgctggaactgacacgcagacattcagcggctccgccgccaatgcaaaactcaaccctaccccaggcagcaatgctatctcagatgcctaccttaatgcctctgaaacaaccactctgagcccttctggaagcgctgtcatttcaaccacaacaatagctactactccatctaagccaacatgtgatgaaaaatatgcaaacatcactgtggattacttatataacaaggaaactaaattatttacagcaaagctaaatgttaatgagaatgtggaatgtggaaacaatacttgcacaaacaatgaggtgcataaccttacagaatgtaaaaatgcgtctgtttccatatctcataattcatgtactgctcctgataagacattaatattagatgtgccaccaggggttgaaaagtttcagttacatgattgtacacaagttgaaaaagcagatactactatttgtttaaaatggaaaaatattgaaacctttacttgtgatacacagaatattacctacagatttcagtgtggtaatatgatatttgataataaagaaattaaattagaaaaccttgaacccgaacatgagtataagtgtgactcagaaatactctataataaccacaagtttactaacgcaagtaaaattattaaaacagattttgggagtccaggagagcctcagattattttttgtagaagtgaagctgcacatcaaggagtaattacctggaatccccctcaaagatcatttcataattttaccctctgttatataaaagagacagaaaaagattgcctcaatctggataaaaacctgatcaaatatgatttgcaaaatttaaaaccttatacgaaatatgttttatcattacatgcctacatcattgcaaaagtgcaacgtaatggaagtgctgcaatgtgtcatttcacaactaaaagtgctcctccaagccaggtctggaacatgactgtctccatgacatcagataatagtatgcatgtcaagtgtaggcctcccagggaccgtaatggcccccatgaacgttaccatttggaagttgaagctggaaatactctggttagaaatgagtcgcataagaattgcgatttccgtgtaaaagatcttcaatattcaacagactacacttttaaggcctattttcacaatggagactatcctggagaaccctttattttacatcattcaacatcttataattctaaggcactgatagcatttctggcatttctgattattgtgacatcaatagccctgcttgttgttctctacaaaatctatgatctacataagaaaagatcctgcaatttagatgaacagcaggagcttgttgaaagggatgatgaaaaacaactgatgaatgtggagccaatccatgcagatattttgttggaaacttataagaggaagattgctgatgaaggaagactttttctggctgaatttcagagcatcccgcgggtgttcagcaagtttcctataaaggaagctcgaaagccctttaaccagaataaaaaccgttatgttgacattcttccttatgattataaccgtgttgaactctctgagataaacggagatgcagggtcaaactacataaatgccagctatattgatggtttcaaagaacccaggaaatacattgctgcacaaggtcccagggatgaaactgttgatgatttctggaggatgatttgggaacagaaagccacagttattgtcatggtcactcgatgtgaagaaggaaacaggaacaagtgtgcagaatactggccgtcaatggaagagggcactcgggcttttggagatgttgttgtaaagatcaaccagcacaaaagatgtccagattacatcattcagaaattgaacattgtaaataaaaaagaaaaagcaactggaagagaggtgactcacattcagttcaccagctggccagaccacggggtgcctgaggatcctcacttgctcctcaaactgagaaggagagtgaatgccttcagcaatttcttcagtggtcccattgtggtgcactgcagtgctggtgttgggcgcacaggaacctatatcggaattgatgccatgctagaaggcctggaagccgagaacaaagtggatgtttatggttatgttgtcaagctaaggcgacagagatgcctgatggttcaagtagaggcccagtacatcttgatccatcaggctttggtggaatacaatcagtttggagaaacagaagtgaatttgtctgaattacatccatatctacataacatgaagaaaagggatccacccagtgagccgtctccactagaggctgaattccagagacttccttcatataggagctggaggacacagcacattggaaatcaagaagaaaataaaagtaaaaacaggaattctaatgtcatcccatatgactataacagagtgccacttaaacatgagctggaaatgagtaaagagagtgagcatgattcagatgaatcctctgatgatgacagtgattcagaggaaccaagcaaatacatcaatgcatcttttataatgagctactggaaacctgaagtgatgattgctgctcagggaccactgaaggagaccattggtgacttttggcagatgatcttccaaagaaaagtcaaagttattgttatgctgacagaactgaaacatggagaccaggaaatctgtgctcagtactggggagaaggaaagcaaacatatggagatattgaagttgacctgaaagacacagacaaatcttcaacttatacccttcgtgtctttgaactgagacattccaagaggaaagactctcgaactgtgtaccagtaccaatatacaaactggagtgtggagcagcttcctgcagaacccaaggaattaatctctatgattcaggtcgtcaaacaaaaacttccccagaagaattcctctgaagggaacaagcatcacaagagtacacctctactcattcactgcagggatggatctcagcaaacgggaatattttgtgctttgttaaatctcttagaaagtgcggaaacagaagaggtagtggatatttttcaagtggtaaaagctctacgcaaagctaggccaggcatggtttccacattcgagcaatatcaattcctatatgacgtcattgccagcacctaccctgctcagaatggacaagtaaagaaaaacaaccatcaagaagataaaattgaatttgataatgaagtggacaaagtaaagcaggatgctaattgtgttaatccacttggtgccccagaaaagctccctgaagcaaaggaacaggctgaaggttctgaacccacgagtggcactgaggggccagaacattctgtcaatggtcctgcaagtccagctttaaatcaaggttcataggaaaagacataaatgaggaaactccaaacctcctgttagctgttatttctatttttgtagaagtaggaagtgaaaataggtatacagtggattaattaaatgcagcgaaccaatatttgtagaagggttatattttactactgtggaaaaatatttaagatagttttgccagaacagtttgtacagacgtatgcttattttaaaattttatctcttattcagtaaaaaacaacttctttgtaatcgttatgtgtgtatatgtatgtgtgtatgggtgtgtgtttgtgtgagagacagagaaagagagagaattctttcaagtgaatctaaaagcttttgcttttcctttgtttttatgaagaaaaaatacattttatattagaagtgttaacttagcttgaaggatctgtttttaaaaatcataaactgtgtgcagactcaataaaatcatgtacatttctgaaatgacctcaagatgtcctccttgttctactcatatatatctatcttatatacttactattttacttctagagatagtacataaaggtggtatgtgtgtgtatgctactacaaaaaagttgttaactaaattaacattgggaaatcttatattccatatattagcatttagtccaatgtctttttaagcttatttaattaaaaaatttccagtgagcttatcatgctgtctttacatggggttttcaattttgcatgctcgattattccctgtacaatatttaaaatttattgcttgatacttttgacaacaaattaggttttgtacaattgaacttaaataaatgtcattaaaataaataaatgcaatatgtattaatattcattgtataaaaatagaagaatacaaacatatttgttaaatatttacatatgaaatttaatatagctatttttatggaatttttcattgatatgaaaaatatgatattgcatatgcatagttcccatgttaaatcccattcataactttcattaaagcatttactttgaatttc

SEQ ID NO: 1733 - protein, 34 aa, Homo sapien
MYLWLKLLAFGFAFLDTEVFVTGQSPTPSPTGKN

SEQ ID NO: 1734 - DNA, 573 bp, Homo sapien
ttaagcacttgttttgggtacaaggcatttctgacattttataaacctacatttaaggggaatttttaaaggaaatgttttttcttttttttttgtttttcgagggggcaaggagggacagaaaagtaacctcttcttaagtggaatattctaataagctaccttttgtaagtgccatgtttattatctaatcattccaagttttgcattgatgtctgactgccactcctttctttcaaggacagtgttttttgtagtaaaatcactggtttatacaaagctttatttagggggtaaagttaagctgctaaaaccccatgttggctgctgctgttgagatactgtgctttgggagtaaaaaaagaaagttatttctttgtcttaaagaatttttaaaaaattagtcatgagacttattcatctttccagggaacatactgattggtcttaaaagactagacagttaagtaaaaggtggctggaacatctatttttctacaaaactggaaaaatgaacctggttctagaagaatgtacaccaaaataaaacatgtgaagcagtattgattcttt

SEQ ID NO: 1735 - protein, 22 aa, Homo sapien
LSTCFGYKAFLTFYKPTFKGNF

SEQ ID NO: 1736 - DNA, 761 bp, Homo sapien
  Unsure 698: Unknown base
  Unsure 717: Unknown base
  Unsure 731: Unknown base
gcacgagcatagacttttaaactggtacggttcttagagatggtccttggccttctgttgttgttgtkgtttttttctttttcttcttctccttctccttcttcttctcttctccttctttcttcttttttttttcagagtcttgctctgtcaccaagactggagtgaagtgatgtgatctcggcttactgcaacctgggaggcagaggttgcagtgagtcgagatggtgccattgctctcgtttgggcaacaagagtgaaactcttgtctcaaaaaaaaaaaaaaaatgaggtttaagacagttttgtcattactggtgggatctggtcacacaagatagcattaaacgtgacatggcacataaaattggttaaaaaattttgttttttaattacgtaatgtaaaagcccaacaaacactttatgcaagattggaatgtatcttcaaattcagatttaataaacatgtaaagatcctctgtatataaaagttgtatttaatcccttgtgccccaagaatgctataaaagatcccaagaatgttatctatgaaaagatagcaatagggaatggtgaacaaataatttaatttgccaattctaaaaaacatggacttaaaccccatgaaaacttggttccatagttttaactgttttatggttccaatacaaaaccagagtggtttacattccacaatnaccaaatttgcatccaatnttggggtaattttnggtatttgccatgggatactattcattttt

SEQ ID NO: 1737 - protein, 42 aa, Homo sapien
  unsure 10: unknown amino acid
MVLGLLLLLXFFSFSSSPSPSSSLLLLSSFFFQSLALSPRLE

SEQ ID NO: 1738 - DNA, 5650 bp, Homo sapien
ggcgcggtcgaggcccggaggcggcggcgcaggaggaagcggaggaggtcgggcgctcggggcccgggaggcgggccgcgcagcgccgcagccccgggctcgccatgctcctggcctcggccgtggtggtctgggaatggctgaacgagcacggccgctggcgtccctacagcccagcggtgagccaccacatcgaggcggtggtccgcgccggcccccgcgcggggggcagcgtggtgctgggccaggtggacagccgtctcgcgccctacatcatcgacctgcagtccatgaaccagttccgccaagacacgggaactctccgcccagttcgccgcaactactacgacccctcctcggcccctgggaagggcgtggtgtgggagtgggagaacgacaatggctcctggacgccctacgacatggaagtgggcatcaccatccagcatgcctatgagaagcagcacccctggatcgacctcacttccattggctttagctacgtaattgacttcaacaccatgggccagatcaaccgtcagacccagcgccaacgccgcgtccgccggcgcctcgacctcatctaccccatggtcacagggaccttgcctaaggctcagtcctggccagtcagccctgggccagccacctcgccccccatgtccccctgctcctgtccccagtgtgtcttggtgatgagtgttaaggcagccgtggtcaatggcagcactgggcccctacagctgccagtgacccgcaagaacatgccgcctcctggagtggtcaagctacccccactgccaggctctggggccaagccactggacagcacaggcaccattcgaggcccactgaagaccgccccatcgcaggtgatccggagacaagcctccagcatgcccactgggacaaccatgggctctcctgccagtcccccaggacccaacagcaagaccggaagggtggccctggccaccttgaatcgtaccaacctgcagcgactggccattgcccagtcccgggtgctgatcgcctctggggtccccacagtcccagtgaagaacctaaatgggtccagtcctgtcaaccctgccttggcaggaatcactgggatcctcatgagtgcagcggggctgcctgtgtgtctcaccaggccaccaaagctggtcctacacccaccccccgtcagcaagagtgaaataaaatccatcccaggggtttccaacacaagccgcaagaccaccaaaaaacaagccaagaaaggtaaaaccccagaggaagtgctaaaaaaatatctacagaaagtccggcacccaccagatgaggactgcaccatctgtatggaacgcctcacggccccctcaggctacaagggcccgcagcctacggtaaaacctgacctggtagggaagctgtccagatgcggccacgtctaccacatctactgcttggttgccatgtacaacaatgggaacaaggatggaagtttgcagtgtccaacctgcaagaccatttatggggtgaagacaggcacccaacctccagggaagatggagtaccacctcatcccccactccttgcctggccacccagactgcaaaaccatccggatcatctacagcatcccccccggcattcagggaccggaacacccgaatcctgggaagagtttcagcgcccgaggcttcccacgacactgttaccttccggacagcgagaaagggagaaaagttctgaagctgctgctcgtggcctgggatcgccgcctcatttttgccattggcacctccagcaccacaggcgagtcagacaccgtcatctggaatgaggtccaccacaagacagagtttggctctaatctcactggccatggctacccagatgccaattacctggataatgtgctggctgaactggctgcccagggcatctctgaggacagcactgcccaggagaaggactgaggccagaaaagctttgaggtgggaggggccatggagactgcaggacaggaagtgaggagagtgagtcaatgtagaagaagttggtgtcctgccctcccaactttctatcctcccctcctgccctgtgtccatccctcatccctcccaaccacagtgggagccagactgaatatagcgacatcattcataaatctcatccaacacaaagggagatgggatgagggccatcctgggtctgttcccatggagtttttggtgctgggtaggcaggaatcccctccctaccccacctcccaagtaggggcatggtcagcacacctagggtatgggcagtgcttaggcactccatatcctggctttgggaagccggggtttcttgcctcagccggcttcttgctacttccactctgctttgagactggagtttctgctattctccctctgctggaggcagggagctctcactgtgcaaggttggggggtgggcaaaggggtgaatcactaaactgctgtgacatcagaaactgatgccttggtgtagagcaaggaagcacttcttcccaagagggtcggagaaggaaaagcctctgggagcacattctgctgtcatcacagtccttggcttctctgggccctcctctcctcctcacagctctcacctgtccaaagaggcatctggttctctcatgtggatggatggactctggggttcctctttggagtggcatcccatgatgctgtttctagaccctctctgatcaaaccagagcctgcatcccactgagcatctgaactgtcctcagggagaggagcccacagccttcttcccaactcattctagaccagctcaaagattccatgagtttcatcgagtcactgtgagtggagcccatgctgggctctgtgccctctgtgtctgtgcatgcgcgtgtgtgtgtgggcgtgtgtgcattgctgggccagcttgaagggaaggcccgtcatgtccctgcactctgttttgcaagatgccaaaccccagttctgatggggctccaacagccaggctgtggtcctttgacgttcctcacctgttgccaacctatcccgtagtgaactgaaaccccaatgaagacagaactgtgcctggggagatgcaatgaggtgagggctgaactcatccttttatatttcttttcaagattggatcagagctcatctccatccagtcttgtttctatgaaggcttcaatctgtttccatgcaaatttgctaatcagagcccagagctgctgggtccctcatctccctcatctattatagattgacttacagcagggagagaatctctttagctcattcctaatggggttgggatcacaatatggtctggtccaatctgcatcttgttgtgtcccaagaccctatctcctccccaacattcttattgcctttggctcccagtaaggaacgaattgggggccagggaggagaacaggggggatcaagaagggaaacccaattccccctttgaaagtgggttctttgaactatgtgtttgggggaagttcctctggatactaatttgaatttatatacctcatgttttgggggtttgacgtatatatatatatatatatatatatatgcatatatatttcataatatttggaaggtttttgatgctagaaaaatggaaacaagagaaccttcaaaaatggtacttagatgggaactggaggccaatctttcataaagccagccccatagctgcttgctgttaggcctccagccattttgacattggggtggatagtcgattcacctgcctgtcagtcgattcacctgcctgtcacccagttctgtggatgtgctggtgctgagcctttgctctctttccaaatggttacagggatgttgatcagctccaccagagggagctctgatgggaggaattgctctgccatccttgtccctgtgtctcctgtcggcaggcagccattgtatctcaccagcagaccaggagactggtcccaaggttactgcaccacagggcaatttcctgccatagttaggaaggaaacacctgaactaaatggaagagacatccctgcggtgtttaatatcacacccatgccctttgtcaggttaccatgtacagagattacttggagagcctcatgccgtctctaccttcgcacactggtcaagtatctgctgagcttcttggccgcaaggatgcagaaataggctgagggtccatgggaagaaagacacaatgaggcagtaggaggtggggaagaaaagaagacagactttcaaaatggaattaggcactggggagagatcagtttccccacatcagggagaagaaggtataggtggggaagggggtggccaggagcagaaggaagaagactcaagatggaaagggagccgctgtgcctgtggcaataccacttggagaggtcgacttcataccttcaagccttttcccctgggcttttgattgtgtctgtgccccctttcttgtcctctctgcagatgcccagtaggggctacctcatcctcgtgctgttcttgtgtggctttctgggcagtagggatcttgaatttcctttctaacactgtgcccggcaaggcggggagcattcctctgccctttgtcttgtgccaacctggaaaggtgcagtctagatttcagtgagaaccctgccagctgagccctgtgcatctactaccttgacacagagtgttttcccactagaagctctgctctgctctcctggcccaagtaggggattccatgccttccctttcatggtcttagcaccagcagcctagtttctcccttccagagtctccagggatgacaaattggattggagacaaacctcgtcagatgctcatcccctaaaaggttaattgtgtatttgtggctgcgtgtgcctttgtgttttcattctcttcccatttttgtacattttggtcttctctgtggttttatacttggtcaaaagtactcgtcttggtattgcactgttgtgtgcatgagaaaactgggggaaggctcactggtacaagaaaggacccctgacccctttccttctctgtggtccccggcattagattgggggttctgggagaggcaggtgaatgtcctaagtgaattgttctgtttgtaactggaatgtttttgaagtctttggtgttgctccgtgaaaggacatcgccacctggtgctcatgaggtgtctttgcagaacaataaatggcaaatgaacaaccacaaaattgttactcttgttggccttctgctgtttgtagattagtgcacctatctgtgagggatttgggttacctccctgagtctgtaagcaaccacaagccctgccactgggtgggggaagtccctccccaaccacttaaaaacaaattttccacatattacccacccacacatttgacctggctagactctttgtttgcctaaaggaacagaccacattgctgggaaaatgagtaagtgaacgtgtgggagaaaaacacttttagaatcacgaatattcacttttaaaggtctctttgcctggctgcaatatagtgtgtgtttaaattatttacaggctgttgtttctcaaataaatgtttaatattaatcattcccaaactgacaagaacacaaaaataaaatgcaaatacagagcc

SEQ ID NO: 1739 - protein, 653 aa, Homo sapien
RGRGPEAAAQEEAEEVGRSGPGRRAAQRRSPGLAMLLASAVVVWEWLNEHGRWRPYSPAVSHHIEAVVRAGPRAGGSVVLGQVDSRLAPYIIDLQSMNQFRQDTGTLRPVRRNYYDPSSAPGKGVVWEWENDNGSWTPYDMEVGITIQHAYEKQHPWIDLTSIGFSYVIDFNTMGQINRQTQRQRRVRRRLDLIYPMVTGTLPKAQSWPVSPGPATSPPMSPCSCPQCVLVMSVKAAVVNGSTGPLQLPVTRKNMPPPGVVKLPPLPGSGAKPLDSTGTIRGPLKTAPSQVIRRQASSMPTGTTMGSPASPPGPNSKTGRVALATLNRTNLQRLAIAQSRVLIASGVPTVPVKNLNGSSPVNPALAGITGILMSAAGLPVCLTRPPKLVLHPPPVSKSEIKSIPGVSNTSRKTTKKQAKKGKTPEEVLKKYLQKVRHPPDEDCTICMERLTAPSGYKGPQPTVKPDLVGKLSRCGHVYHIYCLVAMYNNGNKDGSLQCPTCKTIYGVKTGTQPPGKMEYHLIPHSLPGHPDCKTIRIIYSIPPGIQGPEHPNPGKSFSARGFPRHCYLPDSEKGRKVLKLLLVAWDRRLIFAIGTSSTTGESDTVIWNEVHHKTEFGSNLTGHGYPDANYLDNVLAELAAQGISEDSTAQEKD

SEQ ID NO: 1740 - DNA, 1660 bp, Homo sapien
atggcaagttccctggctttccttctgctcaactttcatgtctccctcctcttggtccagctgctcactccttgctcagctcagttttctgtgcttggaccctctgggcccatcctggccatggtgggtgaagacgctgatctgccctgtcacctgttcccgaccatgagtgcagagaccatggagctgaagtgggtaagttccagcctaaggcaggtggtgaacgtgtatgcagatggaaaggaagtggaagacaggcagagtgcaccgtatcgagggagaacttcgattctgcgggatggcatcactgcagggaaggctgctctccgaatacacaacgtcacagcctctgacagtggaaagtacttgtgttatttccaagatggtgacttctatgaaaaagccctggtggagctgaaggttgcagcactgggttctaatcttcacgtcgaagtgaagggttatgaggatggagggatccacctggagtgcaggtccaccggctggtacccccaaccccaaatacagtggagcaacgccaagggagagaacatcccagctgtggaagcacctgtggttgcagatggagtgggcctatatgaagtagcagcatctgtgatcatgagaggcggctccggggagggtgtatcctgcatcatcagaaattccctcctcggcctggaaaagacagccagcatttccatcgcagaccccttcttcaggagcgcccagccctggatcgcagccctggcagggaccctgcctatcttgctgctgcttctcgccggagccagttacttcttgtggagacaacagaaggaaataactgctctgtccagtgagatagaaagtgagcaagagatgaaagaaatgggatatgctgcaacagagcgggaaataagcctaagagagagcctccaggaggaactcaagaggaaaaaaatccagtacttgactcgtggagaggagtcttcgtccgataccaataagtcagcctgatgctctaatggaaaaatggccctcttcaagcctgcctgatttttcctgcatgggaagagcccacatgtagccctgaggttcccttcccaggacagctccaggatcgagatcactgtgagtggttgtggagttaagacccctatggactccttcccagctgattatcagagccttagacccagcactccttggattggctctgcagagtgtcttggttgagagaataacgttgcagttcccacagggcatgtgactttgaaagagactagaggccacactcagttaataatggggcacagatgtgttcccacccaacaaatgtgataagtgatcgtgcagccagagccagccttccttcagtcaaggtttccaggcagagcaaataccctagagattctctgtaatattggtaatttggatgaaggaagctagaagaattacagggatgtttttaatcccactatggactcagtctcctggaaaaggatctgtccactcctggtcattggtggatgttaaacccatattcctttcaactgctgcctgctagggaaaactgctcctcattatcatcactattattgctcaccactgtatcccctctactgggcaagtgcttgtcaagttctagttgttcaataaatttgttaataatgctgaa

SEQ ID NO: 1741 - protein, 332 aa, Homo sapien
MASSLAFLLLNFHVSLLLVQLLTPCSAQFSVLGPSGPILAMVGEDADLPCHLFPTMSAETMELKWVSSSLRQVVNVYADGKEVEDRQSAPYRGRTSILRDGITAGKAALRIHNVTASDSGKYLCYFQDGDFYEKALVELKVAALGSNLHVEVKGYEDGGIHLECRSTGWYPQPQIQWSNAKGENIPAVEAPVVADGVGLYEVAASVIMRGGSGEGVSCIIRNSLLGLEKTASISIADPFFRSAQPWIAALAGTLPILLLLLAGASYFLWRQQKEITALSSEIESEQEMKEMGYAATEREISLRESLQEELKRKKIQYLTRGEESSSDTNKSA

SEQ ID NO: 1742 - DNA, 6452 bp, Homo sapien
ggaagaaagtaaaaactcaaacaagctcatttgatatacaaaaagcagaatggcttcgaaaatataatcccgagcagctccttcaagatgaaggctacaaaaaacatataaaacaccactgtaataaggttttgcttcgtgtgagaatgctgtattatctaaagcaagaagttattggaaatgagtgtcagaaagtatttgatggagttgatgcaagtgacattgatgtttgggtaccagaaccagaccactcagaagttcctgctgagtggtgggattttgatgctgataagtcactccttattggagtttttaaacatggatatgaaaaatataacactattcgagcagacccagcattatgcttcttggaaagagtgggaaaacctgatgagaaagcagttgctgctgaacagagagcgaatgattatatggatggggatgtggaagatccagaatacaaacctgccccagccatctttaaagatgatatagaggatgatgtttcctcaccaggagatcttgttatagcagatggagatggtcaactgatggagggtgataaagtatattggcctactcaatcagctttaaccacacgtttgaggcgtctcatcactgcataccagcgtactaataaaaacagacaaattcaacagatacaaccgactttctcggtgcctaccagtgtaatgcagcctatttatgaggaagccactcttaatcctaaaatggcagccaagatagaaagacagcaaagatggacaagaagagaagaagctgacttttatagggttgtatctacatttggagtggtttttgaccctgacagaggccaatttgattggacaaaatttagagctatggctaggctacataagaaaactgatgatagtttggaaaaatatttgtacgcattcatgtccatgtgtcggagggtttgtcgtcttccttccaaagaagaattggtggatccaaatatttttatccagcccatcacagaagaacgtgcttctaggactttgtatcgcattgaacttctaaggaaagtacgggaacaggcccttcgacatccacagttgtttgaacgcttgaagctttgccatccaaatccagatttaccagtctggtgggaatgtggccctcatgatagggatttgcttattggtgctgccaaacacggggtgagccgaacagactatcacattcttcgtgatcctgaactctcatttatggcagctcagaggaactacagtcaaagtaagatggctcattcaaggacttctaccccacttctacagcaatatcaagtagcactttctgcttctcctcttacctctctacctaggctcctagatgctaaaggtattattctagaggagatgaaagttaaaagtgaaaaccttaaagaggagcctcagtcttctgaagaagaatctatgtcttctgtggaaaccaggacactgataaaatctgagcctgtaagtccaaagaatggtgttttaccacaggctactggagaccagaaatctggtggaaaatgtgaaacagacagacgcatggttgcagccagaacagaacccctaactccaaacccagcttctaagaaaccaagagtccacaaaaggggatcagaatctagttctgattctgactcagattctgagagatcatcttgttcttccagatcatcttcttcctcatcatcctcttcttgctcccactctcgatcaggctctagttcttcttcatcttcatcttgttcttcagcatcttcttcatcctcttcctccacctcttcctcctcctcctcctcttcatcttcatcagaagaaagtgacagtgatgaagaagaagcccaaaaacgagaaagtactactcacatgaaagcctatgatgaagaaagcgtcgcgtcactgagcactacccaggatgagactcaggatagttttcagatgaacaatgggacaccagagtctgcttatatcttacaaggtggatatatgctggcagcctcgtattggccaaaggatcgtgtgatgatcaataggttggacagtatttgtcaaacagttctgaaaggaaagtggccttcagctagaagaagttatgatgctaacacagtggcttctttctataccacaaaactgctggacagccctggagcagctacagaatacagcgagcccagtgtacccactcccccaggtgccggtgttaaagaagaacatgatcagtcaacacagatgtcaaaggaaggtggtttgaagttgacatttcagaagcaagggcttgctcagaaaagaccatttgatggtgaagacggtgctctggggcagcagcagtacctcactcggcttcgagagcttcaaagtgcatcagagaccagcctcgtcaatttcccaaaatccataccagtatcaggtacttccattcaaccaacccttggtgccaatggtgtgatattagacaaccagcctatagtcaaaaaaaggcgaggaaggaggaagaatgtagaaggtgttgacatcttcttttttaacagaaataaaccacctaatcatgtttctttaggcttaacctcctcacagatttccacagggataaatccagcactatcctatactcaacctcaaggaattcctgatacagaaagtccagttccagttattaatcttaaagatggaacgagacttgcaggagatgatgcaccaaagagaaaggatttggaaaaatggcttaaggagcacccgggttatgtggaagatttgggagcttttattcctagaatgcagcttcatgagggaagacccaaacaaaaaagacaccgttgcagaaaccccaataaactagatgtgaatagtctcactggagaagaacgtgttcaactgattaacagaagaaatgctagaaaggttggaggtgcatttgctccccctttgaaagatttatgtagattcctaaaagaaaattcagaatatggagtagctcctgaatggggagatgttgttaagcaatctggatttcttccagaaagcatgtatgaacgtattctcactggtcccgttgtgagagaggaagtaagcaggcgggggagacggcctaaaagtggaattgcaaaggccacagcagcagcagctgctgcatctgccaccagtgtttcaggcaatcctttgttagccaatggactacttccaggtgtggatctcacaactcttcaggccttacaacaaaacctacaaaacttgcagtcactgcaagtaactgctgggttgatgggaatgcctaccggccttccttctggaggagaagctaaaaacatggctgctatgttccccatgctgctgtcaggaatggctggattaccaaatctgttgggcatgggaggactcctgacaaagcctacggaatctgggacagaagacaaaaagggaagtgactctaaggagtcagaaggaaaaacagaaaggacagagagccaaagttcagagaatggtggagaaaactctgtgtcaagttctccttccgcatcctctactgctgcattaaatacagctgcagctgccaacccattagctcttaacccactattactatctaatatactttatccagggatgcttctcactccaggccttaatcttcatattccaactttgtcccagtccaatacttttgatgtacaaaacaaaaacagtgacttaggctcgtctaagtctgtagaagtaaaagaagaagattccagaattaaagatcaggaagacaaaggaggaactgaaccaagtcctctcaatgaaaacagcacagatgagggttcagagaaagctgatgcttcatctggatctgatagtacatcgtcgtcatctgaggattcagattctagtaatgaagactgattcccagactctgcacttaaaatatgaactgattttggattttttctttaataattaattgtaaataccccagtgttgagtgcatcaataacttactgaccgaacatttcagttatttgtttagaagtgcaaactgctttcagagactttttgcatgtaatatttcttaagattcataagtttctgaactcgtatgtactatcaaatacataaaggtgtaaaattacaacaaaaggcattataattttgttgggggttaattttatgaaaattatgctcaataagagttgtatatttaatatatttgcagtgaacacagaatactttatgcatattactgatttaatttgaatatagttttacagcctccttgacacctataatttacagatcaaaactcagcaataatttgggcagctaatgaatgtcatgaaagctgtagaatctacatcaccatccattgctttaattacatgaaaatgctctagtgttgtgatgcactgctgatgtttccaattcaggtacaagtatgttttaaagaagaaataagtttcccaatcagccaatttaactggctacctgttacctcagctgagttagtttaggaagtttacattcgtttctaattctatacttgttttcaggggttttttaaacacatcctatatatcatgtcaatctggcaagaaatatgacttgctttttgctgagcttaattcagatatcagtaaaattaagtcataaaataatcatgtgtcatgtgactttggcaccctatagacatacttagttttaacttttcaaagtttggcctcctattagaaataatcatgtctcagatgagtaatgtctgtttccagggttcagaaaaggcaaactcatgaaatgccactgaaaagaactttcaacacagcatacttcatgtaaaagaaattgtttgtttgctttctttgtgtagatttctatttgtgttttatgtcatggaaatattccagaattaacagataatagtggtaaagtaatatgcagatagtctaaattcattttgagtttctaggtgtaagcagactaaatgttgcccagaatcagtgttgggttatcagtttatattaaatatactgagttgcccgttttgaaaatgcactttgaataatctcaaaaagatgtacaagttatacctgtaaaccacaaaagtgaagcctgaggcttctgttcaatttcatagactcctttaccatgtaaaatttgtctgatatttgatttgtgatacaatttctcctgctaaagctgctattattctgacaaggtagaggtccaggttcacctttatatatatttaaaacaattagtactgaattggacataaaaatattgacattctaaggagagatatatgttagcatttttctggtactcaaataagttagtagtaaagtctgcaagggcataaatttagggggaaaaagtgtcccagttctctcctacagaaaaaatactttcagtatgttttgataaaactgttgctttgtcatgagttagtcaattgtatcaggttttccaagacctttaccagtaaattatgtttctgtatgtaaaataaccccttattagagagacagtgttatatgtatttacaaaattatataagttccattgggattgtattgattttgtattttcccaaaatagtactttgaattgatagtcctttatgcaatgtcttagcaatagtctctataatgcccatccaggagaagtgggtagtaattcttcatcatgaaaatgatatattacatatttagtatcttccctttgcagtattgcacttttgtttaactagaatacacctatgagatagccaaagtttcaaacacagttatcttagtttaccggtggagtatttcaacaccaaccacatttcccttcctccctctaattctacccacatgatctttattccttcctttcgccaattaaaaaaaaaaaaaaggaaaaaaaatctgtagatcttgtcactaaaatctaatttatatcaaatttatgagagaaagtattttcctaattatggtcaaataaatttggttaacatcctagtgattctctttctatataataaggcaattacagttttcaaagcattaagtctaacataactttaaacattctcttaggtttcaagacacttctatttaatattcattggggaaaagttgtccagctatcagctaagaaaacacatgcaaatatggttgtgtaaagttaagggttataaggaaaaaaaaatcagtagaattacataatactaaagttgcagttgaaagaatatccaagtatgtgttggtagttactaaaagaattatagctgttattgccttgtatttatagcccttgtttcaggttttatgattcaagtcttagtccaatctttcttttggacatttgcaatatttaccagttgtgttttgtgtagtctgaatttgctttctgtagttgagcaaacgtcttaaaaagtcatttgtaatttattaaattactttctatgatgttctatagagc

SEQ ID NO: 1743 - protein, 1297 aa, Homo sapien
KKVKTQTSSFDIQKAEWLRKYNPEQLLQDEGYKKHIKHHCNKVLLRVRMLYYLKQEVIGNECQKVFDGVDASDIDVWVPEPDHSEVPAEWWDFDADKSLLIGVFKHGYEKYNTIRADPALCFLERVGKPDEKAVAAEQRANDYMDGDVEDPEYKPAPAIFKDDIEDDVSSPGDLVIADGDGQLMEGDKVYWPTQSALTTRLRRLITAYQRTNKNRQIQQIQPTFSVPTSVMQPIYEEATLNPKMAAKIERQQRWTRREEADFYRVVSTFGVVFDPDRGQFDWTKFRAMARLHKKTDDSLEKYLYAFMSMCRRVCRLPSKEELVDPNIFIQPITEERASRTLYRIELLRKVREQALRHPQLFERLKLCHPNPDLPVWWECGPHDRDLLIGAAKHGVSRTDYHILRDPELSFMAAQRNYSQSKMAHSRTSTPLLQQYQVALSASPLTSLPRLLDAKGIILEEMKVKSENLKEEPQSSEEESMSSVETRTLIKSEPVSPKNGVLPQATGDQKSGGKCETDRRMVAARTEPLTPNPASKKPRVHKRGSESSSDSDSDSERSSCSSRSSSSSSSSSCSHSRSGSSSSSSSSCSSASSSSSSSTSSSSSSSSSSSEESDSDEEEAQKRESTTHMKAYDEESVASLSTTQDETQDSFQMNNGTPESAYILQGGYMLAASYWPKDRVMINRLDSICQTVLKGKWPSARRSYDANTVASFYTTKLLDSPGAATEYSEPSVPTPPGAGVKEEHDQSTQMSKEGGLKLTFQKQGLAQKRPFDGEDGALGQQQYLTRLRELQSASETSLVNFPKSIPVSGTSIQPTLGANGVILDNQPIVKKRRGRRKNVEGVDIFFFNRNKPPNHVSLGLTSSQISTGINPALSYTQPQGIPDTESPVPVINLKDGTRLAGDDAPKRKDLEKWLKEHPGYVEDLGAFIPRMQLHEGRPKQKRHRCRNPNKLDVNSLTGEERVQLINRRNARKVGGAFAPPLKDLCRFLKENSEYGVAPEWGDVVKQSGFLPESMYERILTGPVVREEVSRRGRRPKSGIAKATAAAAAASATSVSGNPLLANGLLPGVDLTTLQALQQNLQNLQSLQVTAGLMGMPTGLPSGGEAKNMAAMFPMLLSGMAGLPNLLGMGGLLTKPTESGTEDKKGSDSKESEGKTERTESQSSENGGENSVSSSPSASSTAALNTAAAANPLALNPLLLSNILYPGMLLTPGLNLHIPTLSQSNTFDVQNKNSDLGSSKSVEVKEEDSRIKDQEDKGGTEPSPLNENSTDEGSEKADASSGSDSTSSSSEDSDSSNED

SEQ ID NO: 1744 - DNA, 3857 bp, Homo sapien
  Unsure 1537-1888: Unknown base
  Unsure 2100-2427: Unknown base
cggcacggggcggggtttagcctgtggtgggcgctgcgggtgtttgcaggaggttgcagtactcgctgggctgaggtcgtctcgggtgaggaggtcgcgccggaagtggctctagccgtggcgcctcggcgtagtaaggagcctgcaacagagttttgttgtttagggggcgcggcaccgcaccgctcccttcaccttgcagcagccatggcgaaaggcagagtcgccgaacgatcgcagttgggcgctcaccacacgacccccgtgggggacggggcagcggggacgcggggtctcgcggcgcctggcagcagagaccaccagaaggaaaaatcctgggtagaagctggatcagcaagaatgtcactccttatattggtgtccattttcttatctgcagcttttgttatgtttttggtatataaaaattttcctcagcttagtgaagaagaaagagtgaatatgaaggttcccagagatatggatgatgccaaggctctaggaaaagttttatccaaatacaaggacaccttttatgttcaagtacttgtagcttattttgctacatatattttcttgcaaacatttgctattccaggctctatatttctcagtatactctcagggtttctttatccctttccactagccttatttcttgtttgtttgtgttctggacttggtgcctctttctgttatatgctttcctatttagttgggagaccagttgtatacaaatacctaacagagaaagcagtaaaatgggtcacagcaggttgcaacgtcatagagaacatctcattaactacattatatttttgagaataacaccatttctgcctaattggtttattaatatcacatctcctgtgataaacgtgccattgaaagttttttttattggtacttttctaggtgttgcacctccttcttttgtagccattaaggcaggaacaacactgtatcaacttacaacagcaggagaagctgtttcctggaactcaatatttattctgatgatcttggctgttctttctattctgccagccatcttccaaaaaaaactaaagcagaaatttgagtaaaaataatcatctgatttttagttttgctgtcatcaccatctcaggattaacagatgcatccatttatgttttaaaatcacctcttcagtaattaaacaaggaatttgtaaaataaaatttcctatcagatagttaaagtaatacatttaagtgacaaggggagaagaaagtaaaaatggaaattggtatactgtgaaaagtgctatcaatagttaaggtagacatcttagacatcttataaattattataccaagggtagctgtagataatagtagtgtggtaggaaattgttgatccagctaattcattcaatttaattgaatattttttatctttaataactaaaatagatatttttaaattctagattttttaaagtagtgttgcaggttttgttaatgttaggcttttttcagagcataaactggaaaacttaaaaagagatttacannnnnnnnnnnnnnnnnnnnnnnnnnnnnnnnnnnnnnnnnnnnnnnnnnnnnnnnnnnnnnnnnnnnnnnnnnnnnnnnnnnnnnnnnnnnnnnnnnnnnnnnnnnnnnnnnnnnnnnnnnnnnnnnnnnnnnnnnnnnnnnnnnnnnnnnnnnnnnnnnnnnnnnnnnnnnnnnnnnnnnnnnnnnnnnnnnnnnnnnnnnnnnnnnnnnnnnnnnnnnnnnnnnnnnnnnnnnnnnnnnnnnnnnnnnnnnnnnnnnnnnnnnnnnnnnnnnnnnnnnnnnnnnnnnnnnnnnnnnnnnnnnnnnnnnnnnnnnnnnnnnnnnnnnnnnnnnnnnnnnnnnnnnnnnnnttggagatggcatgttagtagacgactgaatatggaaaggatatcgagttatctattttgttaattttatttttgttttttatcatctagatttttatcatggattagtctgaaatttaaagttctggccagtcggttttctttcatcttgtagtttttacagtatttccactgtgcatatgcaaaatgggtattacataactgtatcatannnnnnnnnnnnnnnnnnnnnnnnnnnnnnnnnnnnnnnnnnnnnnnnnnnnnnnnnnnnnnnnnnnnnnnnnnnnnnnnnnnnnnnnnnnnnnnnnnnnnnnnnnnnnnnnnnnnnnnnnnnnnnnnnnnnnnnnnnnnnnnnnnnnnnnnnnnnnnnnnnnnnnnnnnnnnnnnnnnnnnnnnnnnnnnnnnnnnnnnnnnnnnnnnnnnnnnnnnnnnnnnnnnnnnnnnnnnnnnnnnnnnnnnnnnnnnnnnnnnnnnnnnnnnnnnnnnnnnnnnnnnnnnnnnnnnnnnnnnnnnnnnnnnnnnnnnnnnnnnnnnnnnnntattcagataatttgttatggctctttaatatcccacaaggggctctaaaaagcaaacattcaagagtatgtagtttttagacattaagttaattattttaaacagtgacagcaaaacacaagtgattaaatatagtttatttgttccaatgactaaattttacctcatttattaatctggtcattaaggaatatatttaataatattatgtaattattctttttatgcatgatacacctagaaaaatgccttttgtttctattgatggctttgttgtttggagctacttttgattacttattgcagtttcccaatttagtctttactttatctaactcacaaagtaaaattaactgatcacatggcaactactgtatttaaatagttctggaaaaatgaaagtgctttttgctgcttggtaaatgggtaatgcccttgattccttgactgtaggacatagctgatctaaagtactctgtcagttttaccttcacccatgactgtcattagttgtcaaagttgaaaagtactttagctgtgagaaatccttgtatgtttttattataagaggtataatcatcctcaaagcctgtttttattacatgatgtggactgattattttttctatcacagtgttaacagatggattttattgtaaatacaaagaaaacatattgattattgtagtattcttatgtcacctggccttttgcgtgagattatttattatttctagcaaggctttcttcctttcttattgcccagagactgactgatacatcttttgttatttttacacataaattaaacatagcctttttggacaaattcactaaatattaatgtataaaatgtaattgagtaaatttttatcagaattttaaaaataaaagagcttagactcagtagaactcagtagaagcttcactatttactccagcgtgtgtaaattgtacttactctattctcagagtatatttactgtccttaccattgattctttccctttgctaatttttttttttgttaatggtagctgcgactttaggtggggtatattttcttctcctaagagaatagacagtttttccagattcatcatcattgactgtcaagaaaggacccttcagcaaggctgtaccctcaatgcagttgatggcctgtcttcacggatttacagacttggcctgatgcccatgtaaattcaagctttggcttgtggtaacaaccacaagaagacaagcatctgtggtgcggaggcaagcaggctaactaggagttgacaagctaagaaagtgaaactgttctttcttagttaactgtctttctctggagctctgttattttgagtataatatttccacgacacttagtaaatgcaagctaaaatgtaataataataaattgtattggagaaacctaaaaaaa

SEQ ID NO: 1745 - protein, 273 aa, Homo sapien
RHGAGFSLWWALRVFAGGCSTRWAEVVSGEEVAPEVALAVAPRRSKEPATEFCCLGGAAPHRSLHLAAAMAKGRVAERSQLGAHHTTPVGDGAAGTRGLAAPGSRDHQKEKSWVEAGSARMSLLILVSIFLSAAFVMFLVYKNFPQLSEEERVNMKVPRDMDDAKALGKVLSKYKDTFYVQVLVAYFATYIFLQTFAIPGSIFLSILSGFLYPFPLALFLVCLCSGLGASFCYMLSYLVGRPVVYKYLTEKAVKWVTAGCNVIENISLTTLYF

SEQ ID NO: 1746 - DNA, 3269 bp, Homo sapien
ggtcgtctcgggtgaggaggtcgcgccggaagtggctctagccgtggcgcttcggcgtagtaaggagcctgcaacagagttttgttgtttagggggcgcggcaccgcaccgctcccttcaccttgcagcagccatggcgaaaggcagagtcgccgaacgatcgcagttgggcgctcaccacacgacccccgtgggggacggggcagcggggacgcggggtctcgcggcgcctggcagcagagaccaccagaaggaaaaatcctgggtagaagctggatcagcaagaatgtcactccttatattggtgtccattttcttatctgcagcttttgttatgtttttggtatataaaaattttcctcagcttagtgaagaagaaagagtgaatatgaaggttcccagagatatggatgatgccaaggctctaggaaaagttttatccaaatacaaggacaccttttatgttcaagtacttgtagcttattttgctacatatattttcttgcaaacatttgctattccaggctctatatttctcagtatactctcagggtttctttatccctttccactagccttatttcttgtttgtttgtgttctggacttggtgcctctttctgttatatgctttcctatttagttgggagaccagttgtatacaaatacctaacagagaaagcagtaaaatggtcacagcaggttgaacgtcatagagaacatctcattaactacattatatttttgagaataacaccatttctgcctaattggtttattaatatcacatctcctgtgataaacgtgccattgaaagttttttttattggtacttttctaggtgttgcacctccttcttttgtagccattaaggcaggaacaacactgtatcaacttacaacagcaggagaagctgtttcctggaactcaatatttattctgatgatcttggctgttctttctattctgccagccatcttccaaaaaaaactaaagcagaaatttgagtaaaaataatcatctgatttttagttttgctgtcatcaccatctcaggattaacagatgcatccatttatgttttaaaatcacctcttcagtaattaaacaaggaatttgtaaaataaaatttcctatcagatagttaaagtaatacatttaagtgacaaggggagaagaaagtaaaaatggaaattggtatactgtgaaaagtgctatcaatagttaaggtagacatcttagacatcttataaattattataccaagggtagctgtagataatagtagtgtggtaggaaattgttgatccagctaattcattcaatttaattgaatattttttatctttaataactaaaatagatatttttaaattctagattttttaaagtagtgttgcaggttttgttaatgttaggcttttttcagagcataaactggaaaacttaaaaagagatttacattttcttcctctttttttttttttttttttctgttttgagacggagtctagctctgccgcccaggctggagtgcagtggcgcgatctccgctcattgcaagctccacctcctgggttcacgccattctcctgtctcagcctcctgagtagctgggactacaggcgcccgccaccatgcccagctaatttttttgtatttttagtagagacggggtttcaccgtgttagccaggatggtctcgatctcctgacctcgtgatctgcccgccttggcctcccaaagtgctgggattacaggcatgagccaccgcgcctggcccattttcttcctcttttgaggtaatggatttgtttggagatggcatgttagtagacgactgaatatggaaaggatatcgagttatctattttgttaattttatttttgttttttatcatctagatttttatcatggattagtctgaaatttaaagttctggccagtcggttttctttcatcttgtagtttttacagtatttccactgtgcatatgcaaaatgggtattacataactgtatcatatttggtattgataattttttttttttttgagacggagtcttgctgttgcccaggctggagtggagtgcgtggtgtgatctcggctcactgcaaactccgcctcctgggttcaagcgattctcctggcccagcctcctgagtagctgggattacaggtgtgtgccaccatgcccagctaatttttgtgtttttagtagagacggggtttcaccatgttggccgggctggtcttgaactcctgacctcaggctatatgcccacttccacctcccaaagtgctgggattacaggcatgagccactgtgcccagcctggtattgataatttatattcagataatttgttatggctctttaatatcccacaaggggctctaaaaagcaaacattcaagagtatgtagtttttagacattaagttaattattttaaacagtgacagcaaaacacaagtgattaaatatagtttatttgttccaatgactaaattttacctcatttattaatctggtcattaaggaatatatttaataatattatgtaattattctttttatgcatgatacacctagaaaaatgccttttgtttctattgatggctttgttgtttggagctacttttgattacttattgcagtttcccaatttagtctttactttatctaactcacaaagtaaaattaactgatcacatggcaactactgtatttaaatagttctggaaaaatgaaagtgctttttgctgcttggtaaatgggtaatgcccttgattccttgactgtaggacatagctgatctaaagtactctgtcagttttaccttcacccatgactgtcattagttgtcaaagttgaaaagtactttagctgtgagaaatccttgtatgtttttattataagaggtataatcatcctcaaagcctgtttttattacatgatgtggactgattattttttctatcacagtgttaacagatggattttattgtaaatacaaagaaaacatattgattattgtagtattcttatgtcacctggccttttgcgtgaggattatttattatttctagcaaggctttcttcctttcttattgcccagagactgactgatacatcttttgttatttttacacataaattaaacatagcctttttggacaaattcactaaatattaatgtataaaatgtaattgagtaaatttttatcagaattttaaaaataaaagagcttagactcagtaggaactc

SEQ ID NO: 1747 - protein, 335 aa, Homo sapien
VVSGEEVAPEVALAVALRRSKEPATEFCCLGGAAPHRSLHLAAAMAKGRVAERSQLGAHHTTPVGDGAAGTRGLAAPGSRDHQKEKSWVEAGSARMSLLILVSIFLSAAFVMFLVYKNFPQLSEEERVNMKVPRDMDDAKALGKVLSKYKDTFYVQVLVAYFATYIFLQTFAIPGSIFLSILSGFLYPFPLALFLVCLCSGLGASFCYMLSYLVGRPVVYKYLTEKAVKWSQQVERHREHLINYIIFLRITPFLPNWFINITSPVINVPLKVFFIGTFLGVAPPSFVAIKAGTTLYQLTTAGEAVSWNSIFILMILAVLSILPAIFQKKLKQKFE

SEQ ID NO: 1748 - DNA, 6084 bp, Homo sapien
  Unsure 3745: Unknown base
  Unsure 3809-3826: Unknown base
  Unsure 5919-5941: Unknown base
gctgcagccgcggccgcagcgcccgcacggagaggcttgaggcggctcctggcgtcgcccagagggagcgactagacgaacagtccggtgagggcggcgagaggaagcccgctacgagtgccctagctccccgccgctctcgatgaaccggacggaataagccgcgcctccagcaggggctgcgcctccatgaatccctagttgtttttttttttttctttctctcccctctcctcacccccaccccgagccccgtcccgccttctcccttcgccagaggcgggccgcgtccaggtgcggagtccataccggagcgcaatggcgtccaaccccgaacggggggagattctgctcacggaactgcagggggattcccgaagtcttccgttttctgagaatgtgagtgctgttcaaaaattagacttttcagatacaatggtgcagcagaaattggatgatatcaaggatcgaattaagagagaaataaggaaagaactgaaaatcaaagaaggagctgaaaatctgaggaaagtcacaacagataaaaaaagtttggcttatgtagacaacattttgaaaaaatcaaataaaaaattagaagaactacatcacaagctgcaggaattaaatgcacatattgttgtatcagatccagaagatattacagattgcccaaggactccagatactccaaataatgaccctcgttgttctactagcaacaatagattgaaggccctacaaaaacaattggatatagaacttaaagtaaaacaaggtgcagagaatatgatacagatgtattcaaatggatcttcaaaggatcggaaactccatggtacagctcagcaactgctccaggacagcaagacaaaaatagaagtcatacgaatgcagattcttcaggcagtccagactaatgaattggcttttgataatgcaaaacctgtgataagtcctcttgaacttcggatggaagaattaaggcatcattttaggatagagtttgcagtagcagaaggtgcaaagaatgtaatgaaattacttggctcaggaaaagtaacagacagaaaagcactttcagaagctcaagcaagatttaatgaatcaagtcagaagttggaccttttaaagtattcattagagcaaagattaaacgaagtccccaagaatcatcccaaaagcaggattattattgaagaactttcacttgttgctgcatcaccaacactaagtccacgtcaaagtatgatatctacgcaaaatcaatatagtacactatccaaaccagcagcactaacaggtactttggaagttcgtcttatgggctgccaagatatcctagagaatgtccctggacggtcaaaagcaacatcagttgcactgcctggttggagtccaagtgaaaccagatcatctttcatgagcagaacgagtaaaagtaaaagcggaagtagtcgaaatcttctaaaaaccgatgacttgtccaatgatgtctgtgctgttttgaagctcgataatactgtggttggccaaactagctggaaacccatttccaatcagtcatgggaccagaagtttacactggaactggacaggtcacgtgaactggaaatttcagtttattggcgtgattggcggtctctgtgtgctgtaaaatttctgaggttagaagattttttagacaaccaacggcatggcatgtgtctctatttggaaccacagggtactttatttgcagaggttaccttttttaatccagttattgaaagaagaccaaaacttcaaagacaaaagaaaattttttcaaagcaacaaggcaaaacatttctcagagctcctcaaatgaatattaatattgccacttggggaaggctagtaagaagagctattcctacagtaaatcattctggcaccttcagccctcaagctcctgtgcctactacagtgccagtggttgatgtacgcatccctcaactagcacctccagctagtgattctacagtaaccaaattggactttgatcttgagcctgaacctcctccagccccaccacgagcttcttctcttggagaaatagatgaatcttctgaattaagagttttggatataccaggacaggattcagagactgtttttgatattcagaatgacagaaatagtatacttccaaaatctcaatctgaatacaagcctgatactcctcagtcaggcctagaatatagtggtattcaagaacttgaggacagaagatctcagcaaaggtttcagtttaatctacaagatttcaggtgttgtgctgtcttgggaagaggacattttggaaaggtgcttttagctgaatataaaaacacaaatgagatgtttgctataaaagccttaaagaaaggagatattgtggctcgagatgaagtagacagcctgatgtgtgaaaaaagaatttttgaaactgtgaatagtgtaaggcatccctttttggtgaacctttttgcatgtttccaaaccaaagagcatgtttgctttgtaatggaatatgctgccggtggggacctaatgatgcacattcatactgatgtcttttctgaaccaagagctgtattttatgctgcttgtgtagttcttgggttgcagtatttacatgaacacaaaattgtttatagagatttgaaattggataacttattgctagatacagagggctttgtgaaaattgctgattttggtctttgcaaagaaggaatgggatatggagatagaacaagcacattttgtggcactcctgaatttcttgccccagaagtattaacagaaacttcttatacaagggctgtagattggtggggccttggcgtgcttatatatgaaatgcttgttggtgagtctccctttcctggtgatgatgaagaggaagtttttgacagtattgtaaatgatgaagtaaggtatccaaggttcttatctacagaagccatttctataatgagaaggctgttaagaagaaatcctgaacggcgccttggggctagcgagaaagatgcagaggatgtaaaaaagcacccatttttccggctaattgattggagcgctctgatggacaaaaaagtaaagccaccatttatacctaccataagaggacgagaagatgttagtaattttgatgatgaatttacctcagaagcacctattctgactccacctcgagaaccaaggatactttcggaagaggagcaggaaatgttcagagattttgactacattgctgattggtgttaagttgctagacactgcgaaaccaagctgactcacaagaagacctcttaaaaatagcaacccttcatttgctctctgtgccaccaatagcttctgagttttttgttgttgttgtttttattgaaacacgtgaagatttgtttaaaagtaccattctaatacttcttcaaaagtggctcctcattgtacttcagcgtaaatatgagcactggaaacagtttcatggagtttaagttgagtgaacatcggccatgaaaatccatcacgaatacttttggatcaatagtctatttttaaaaagaaagaaaaaaaccacttttttatagtccctagctttgccatatgcccgccttaagtggaaggaaagttaatcacttaactatgttttataaaaagaaaaaagggcttggaatgctattactgttcacacaaagtatgattctgtttgaataaggcaaatgctcctttttttaanaaaaaaagacattactgtaatatcaaaaaccgtgggcagtttgtatacaactcggggctgggannnnnnnnnnnnnnnnnnccagaattgatgtcttattttataaatgttctatatttattaggagaaaactttatattgccttttttatcaatcatgtaacaggcttatagctttccaacagagctgcttgccaaacaattttttttgtttattaaacagtgctgaaacaaacaggatcagcatttacttaagatgttaagaatgaggacttttaatcagccgaaccaagatattgttacctgtatgcattcccaaagtctagatgctcagtatgttcagtcatatctttcagaatcagtgaaccgattaccctttttttggtattcactctacatctgccaacctagttcaccttggttttgtgtctgctgtagaagggaaccataacttggttaaaccgtagggattatcattgtatacatgctgtgaacatgtatatgtgcaagttttaatgtattctatgttgtaggcttattatttaattttaccacttcatcacttttgtacagtggccaagcagacacctcaaactccagcatttacattaagtgcatttgtacattttaggccactggatccagattttatattggcagttattgagggcaaaagcaatatattgtaacagaatgtataaatatttttgataaaacagtctatattttattaaaaaatgaattataacactaaagctgtacctcaaaagtctcaaaaataatttgatgaaatattttatacaactcttcaaaggatccgtctgtggctttttatactcttttagggttgtctttttacaaaccatgactttccacttgcctgtagttttttgtttgttttggtttggtttgattttatatttttttctcctaatctatgactttattgttttttcttagtttagtaatagcatctttgatcctgtgcttagcatgttagggtcattatacctcaggaatagcaagctgttaagtaaccatactgaattaactatttaattacagtgagctcatctcttaaaaattgttcaggtgtaaatcttatgagaaacatgaaaaagcacactgatttatggagagttgagctaaaaacatttataaatatttgctgggatgttttagcatcttttcattgtactctgagaacaattaaaattgtccagagatcatttatattaccttccaaattgtttattacccaagatcctttgggagaaaatcttatagaatgggggaacaatatgtggtttaaagttattttaaaatgccagttaatttcctcggcaaaggacaatagaggaacttagcttaattgtctggctttaatttaaactgtgttaatacaacattaaaataaaacactaaatacttttgaggtacagtctgctcacttttttggttctcaaatagcaaagaaagtaatgtctaaaataggctcttagcattaaaaactgacagcattttgtaactacacagtgtacagaatttttttttaattgaagtcaatcactaaaaaaattagaaggcagggtctatttacacaattaagctgaagaaagcactaattttttgtagtttaaaatatatatatattttagtcagatttaaaattttaagctttatagagtgtaaatatattttgctattactgtatgtgtatgtgactgctcaagcactttgtaaagaaattaggatattttagaatggtacactatgcattcaaatgaaatgtgcctttcactatgtcattctaagaaaacaagtgttttttgcagtcataaattatcacaaatgcacaaattaaagtctatatagattgaaatttgtaactttggttttaagtattctttccttttagaaacttcctaatgattaaaatatactttaacttttctgtgttcaaaatctcaaagactaattaactttaataaacattcttgcaagtactttttgtcctagtgaaggcttaaaaccatgaacattcagagcaaactgtccacttcattgggaataatgggaaaagtttgtattctgctcctgtaaggtcagtagcatcttttatttgaagcatatttatggactgcttactgtgtatagatactgagaataggaagnnnnnnnnnnnnnnnnnnnnnnntgttgatgaatgaagaacagcctgttttaattaagatgcaagcaccagtattgtatgtacttttctcttgtttgaggttagcttattttaatttaggacctggcttctcaaaaaggcaaatgaataaaacagaatactagtaa

SEQ ID NO: 1749 - protein, 984 aa, Homo sapien
MASNPERGEILLTELQGDSRSLPFSENVSAVQKLDFSDTMVQQKLDDIKDRIKREIRKELKIKEGAENLRKVTTDKKSLAYVDNILKKSNKKLEELHHKLQELNAHIVVSDPEDITDCPRTPDTPNNDPRCSTSNNRLKALQKQLDIELKVKQGAENMIQMYSNGSSKDRKLHGTAQQLLQDSKTKIEVIRMQILQAVQTNELAFDNAKPVISPLELRMEELRHHFRIEFAVAEGAKNVMKLLGSGKVTDRKALSEAQARFNESSQKLDLLKYSLEQRLNEVPKNHPKSRIIIEELSLVAASPTLSPRQSMISTQNQYSTLSKPAALTGTLEVRLMGCQDILENVPGRSKATSVALPGWSPSETRSSFMSRTSKSKSGSSRNLLKTDDLSNDVCAVLKLDNTVVGQTSWKPISNQSWDQKFTLELDRSRELEISVYWRDWRSLCAVKFLRLEDFLDNQRHGMCLYLEPQGTLFAEVTFFNPVIERRPKLQRQKKIFSKQQGKTFLRAPQMNINIATWGRLVRRAIPTVNHSGTFSPQAPVPTTVPVVDVRIPQLAPPASDSTVTKLDFDLEPEPPPAPPRASSLGEIDESSELRVLDIPGQDSETVFDIQNDRNSILPKSQSEYKPDTPQSGLEYSGIQELEDRRSQQRFQFNLQDFRCCAVLGRGHFGKVLLAEYKNTNEMFAIKALKKGDIVARDEVDSLMCEKRIFETVNSVRHPFLVNLFACFQTKEHVCFVMEYAAGGDLMMHIHTDVFSEPRAVFYAACVVLGLQYLHEHKIVYRDLKLDNLLLDTEGFVKIADFGLCKEGMGYGDRTSTFCGTPEFLAPEVLTETSYTRAVDWWGLGVLIYEMLVGESPFPGDDEEEVFDSIVNDEVRYPRFLSTEAISIMRRLLRRNPERRLGASEKDAEDVKKHPFFRLIDWSALMDKKVKPPFIPTIRGREDVSNFDDEFTSEAPILTPPREPRILSEEEQEMFRDFDYIADWC

SEQ ID NO: 1750 - DNA, 3255 bp, Homo sapien
ggagcgcaaatggcgtccaaccccgaacggggggagattctgctcacggaactgcagggggattcccgaagtcttccgttttctgagaatgtgagtgctgttcaaaaattagacttttcagatacaatggtgcagcagaaattggatgatatcaaggatcgaattaagagagaaataaggaaagaactgaaaatcaaagaaggagctgaaaatctgaggaaagtcacaacagataaaaaaagtttggcttatgtagacaacattttgaaaaaatcaaataaaaaattagaagaactacatcacaagctgcaggaattaaatgcacatattgttgtatcagatccagaagatattacagattgcccaaggactccagatactccaaataatgaccctcgttgttctactagcaacaatagattgaaggccttacaaaaacaattggatatagaacttaaagtaaaacaaggtgcagagaatatgatacagatgtattcaaatggatcttcaaaggatcggaaactccatggtacagctcagcaactgctccaggacagcaagacaaaaatagaagtcatacgaatgcagattcttcaggcagtccagactaatgaattggcttttgataatgcaaaacctgtgataagtcctcttgaacttcggatggaagaattaaggcatcattttaggatagagtttgcagtagcagaaggtgcaaagaatgtaatgaaattacttggctcaggaaaagtaacagacagaaaagcactttcagaagctcaagcaagatttaatgaatcaagtcagaagttggaccttttaaagtattcattagagcaaagattaaacgaagtccccaagaatcatcccaaaagcaggattattattgaagaactttcacttgttgctgcatcaccaacactaagtccacgtcaaagtatgatatctacgcaaaatcaatatagtacactatccaaaccagcagcactaacaggtactttggaagttcgtcttatgggctgccaagatatcctagagaatgtccctggacggtcaaaagcaacatcagttgcactgcctggttggagtccaagtgaaaccagatcatctttcatgagcagaacgagtaaaagtaaaagcggaagtagtcgaaatcttctaaaaaccgatgacttgtccaatgatgtctgtgctgttttgaagctcgataatactgtggttggccaaactagctggaaacccatttccaatcagtcatgggaccagaagtttacactggaactggacaggtcacgtgaactggaaatttcagtttattggcgtgattggcggtctctgtgtgctgtaaaatttctgaggttagaagattttttagacaaccaacggcatggcatgtgtctctatttggaaccacagggtactttatttgcagaggttaccttttttaatccagttattgaaagaagaccaaaacttcaaagacaaaagaaaattttttcaaagcaacaaggcaaaacatttctcagagctcctcaaatgaatattaatattgccacttggggaaggctagtaagaagagctattcctacagtaaatcattctggcaccttcagccctcaagctcctgtgcctactacagtgccagtggttgatgtacgcatccctcaactagcacctccagctagtgattctacagtaaccaaattggactttgatcttgagcctgaacctcctccagccccaccacgagcttcttctcttggagaaatagatgaatcttctgaattaagagttttggatataccaggacaggattcagagactgtttttgatattcagaatgacagaaatagtatacttccaaaatctcaatctgaatacaagcctgatactcctcagtcaggcctagaatatagtggtattcaagaacttgaggacagaagatctcagcaaaggtttcagtttaatctacaagatttcaggtgttgtgctgtcttgggaagaggacattttggaaaggtgcttttagctgaatataaaaacacaaatgagatgtttgctataaaagccttaaagaaaggagatattgtggctcgagatgaagtagacagcctgatgtgtgaaaaaagaatttttgaaactgtgaatagtgtaaggcatccctttttggtgaacctttttgcatgtttccaaaccaaagagcatgtttgctttgtaatggaatatgctgccggtggggacctaatgatgcacattcatactgatgtcttttctgaaccaagagctgtattttatgctgcttgtgtagttcttgggttgcagtatttacatgaacacaaaattgtttatagagatttgaaattggataacttattgctagatacagagggctttgtgaaaattgctgattttggtctttgcaaagaaggaatgggatatggagatagaacaagcacattttgtggcactcctgaatttcttgccccagaagtattaacagaaacttcttatacaagggctgtagattggtggggccttggcgtgcttatatatgaaatgcttgttggtgagtctccctttcctggtgatgatgaagaggaagtttttgacagtattgtaaatgatgaagtaaggtatccaaggttcttatctacagaagccatttctataatgagaaggctgttaagaagaaatcctgaacggcgccttggggctagcgagaaagatgcagaggatgtaaaaaagcacccatttttccggctaattgattggagcgctctgatggacaaaaaagtaaagccaccatttatacctaccataagaggacgagaagatgttagtaattttgatgatgaatttacctcagaagcacctattctgactccacctcgagaaccaaggatactttcggaagaggagcaggaaatgttcagagattttgactacattgctgattggtgttaagttgctagacactgcgaaaccaagctgactcacaagaagacctcttaaaaatagcaacccttcatttgctctctgtgccaccaatagcttctgagttttttgttgttgttgtttttattgaaacacgtgaagatttgtttaaaagtaccattctaatacttcttcaaaagtggctcctcattgtacttcagcgtaaatatgagcactggaaacagtttcatggagtttaagttgagtgaacatcggccatgaaaatccatcacgaatacttttggatcaatagtctatttt

SEQ ID NO: 1751 - protein, 984 aa, Homo sapien; identical to SEQ ID NO: 1749

SEQ ID NO: 1752 - DNA, 12565 bp, Homo sapien
gtcgacctgcaggtcaacggatctgagaggagagtagcttcttgtagataacagttggattatataccatgtcctgatccccttcatcatccaggagagcagaggtggtcaccctgatagcagcaagcctgggggctgcagcttggtgggtagaggtactcaggggtacagatgtctccaaacctgtcctgctgccttagggagcttctaataagttgatggatttggttaaaattaacttggctacttggcaggactgggtcagtgaggaccaacaaaaagaagacatcagattataccctgggggtttgtatttcttgtgtttctttctcttctttgtactaaaatatttacccatgactgggaaagagcaactggagtctttgtagcattatcttagcaaaaatttacaaagtttggaaaacaatattgcccatattgtgtggtgtgtcctgtgacactcaggattcaagtgttggccgaagccactaaatgtgagatgaagccattacaaggcagtgtgcacatctgtccacccaagctggatgccaacatttcacaaatagtgcttgcgtgacacaaatgcagttccaggaggcccaaatgaaaatgtttgtactgaaatttgttaaagcttcccgacaaactagatttatcagtaaggattgttttctgcaagggggatgaaacttgtggggtgagccatttgggctgaggaggagggaggttggagctgagaaatgtggagacaatttccctttagaaggactgaatctccctgcctctctggggtgcggcagccagcaggatccaatggtgtatatgtctccccagctccccattcagtgatatcatgtcagtagcttgaaattatccgtggtgggagtattatgtcatggaaattggcaaatggaaacttttattggagattcaattgttaaacttttaccagcacaacactgccctgccttcagagtcaatgaccctatccaagtttaatccatctgtccactgtctccaacacgatctttataaaacacacctgacaacattacccttttattcagttttttaaaagataagtttccagctcatcggggtggctttaaaggccatttctcctctggacctcacccaacttttcaaatcacttttcctacccctacctctaaatgctactcaaactccagccatcctgaataataagacttttgaaaagtagattatgggctgggcacagtggctcacacctgtaatcccagcactttgggaggccaagatgggtggatcacctgaggtcgggagttcgagaccagcctgactaacatagtgaaaccctgtctctactaaaaatacaaaattagttgggggtggtggcacaagcctgtaatcccagctactcaggaggttgaggcaggggaattgcttgaacctgggaggcggaggttgcggtgagcctagattgctccactgcactccagcctgggcaacaagagcgaaactccatctcaaaaaaataaataaataaataaagtagattacatcagatacctctggcctaggttgtttatgaccaactctcctgctgagaataactagaaaagctagacaaaacatatttccaaaagatctctttggaggcatcagagaatggccaaggctgtaaggaactgcctgagcccagagaggtggagcccagcactggtgccctttactcctggggacatgtgctggtttcaaaaacttcagctgagcttttgagcattcatggaacttggtgggggagatgaaatttgtaccttaaatcctgcctacagggagggtccctgataatccccacccaatttggaaatctgggtcagccttcacaggtactgaagccctcctctgaatgatctcaagtcctgctagggtagaggttacctgcttttgaaaggctcctggcctacctgtgcagcaggagcaaaagtgaaccatctcagggtacagataacaatcatccagagccttgaatgacctctactgtgcttaatatatagtattcagcagtcagtaaaaaggatttaggcacatgcaagatgacctgtgtatcagggagaaataggcaataaattgagatccagcagggatttgaatcatggatttgaatcaggggcagccttcgaaagaactatggagaatatactcagatttaaaacataagattggaatttttggcagagaactaacaactgtacaaaaaaggaaccaaatggaaatcctagaactgaaagatgcaattaaccgatgttgagaaatagccaacatctattgaacacttcccatgtggacagctgtgctaaacactttacaggcatcaacataagatgtgtccccttacagcagtgcagtgtccctcctaagacatggacagcctggtttccctatctctctgcttcatcaaaacccctttacgtggggcttagacactcctgttgtctctagtgtctagtagcacagggctcagcacatggaagccactagatacaatttgatgaccaggacctccgatgaaagccatgggtgctgattgggaaggcattgtcttttatgtgctatggtcttaaagcttcatccaggaagcagaactcggggggtgctgaggacccagaaccgagaataagattagtcagagatttcctgtgggcagaaatcataaggacgccaactgtttgggtgagataagacgaaaccaagagtggacttgtggccagaagcgtgaggaagagggagagagcttcccttgtcccctttcttcctctccctaagccacagtgattgacagcccccccgctttggagtcagagcaggcttgagactggactgggaaaggagggtgggtcaggatacagagcaggaaggctgggagtgcagggcaggagcaaggggctggggcattcattgtgcctgatctctcccactttacctggggtaaagaagcatatgcaaaagccacggtgtgagtatttcccaagtgccagggtcagggcatgattcatcacgtgcagcatttcattcaatccttatagtaaccgatgatgtggcttctattattagctctatcagataatgaaactgagaccaagacaggctctgcacattgtgtggggtaatgacacagggggattcagacctagactccataactcctgccccagggaccacccccaccctcaccctgtgcatgtcgacaaaggacagactgggccacttctcaggacacagcggggaaatgacacagagcagggaggttccaggagccccgagcgtcttttctccaggagaatactctctgaattcagactggggtcagagaaacatttacccaggagccgcagtgtgggtggggctttttacttgaaacgctgtctgaaggcagtggcaggatgaactctccaccctaccttggcaagccacttctcttctgcaatctgtaaggacattgttgagagaattatggtcttccaattccggagggttgaagaaagacaaataggagagaacctatcatagtcaggtgctagctgccttctctttcagagagtgtgagaataaagtgatacacttgattattagcaaatactttggaaattttaaacgctaatattcaacacactctggaagaggcaaataagtagacaggttcatatacatcatctccttcagctagtcctcacaaaaacaaacaaatgaataaacaaaattcttctttggccctcataggaagacactgtttcttgaacgtgtttcaaaaaggatgggtgactcactcaaggtcacactgtttatgaggacagtacaggaatacagacatgccattttgcctgaaaaaatccatcacccagggaggtgacacaattttgcagaaatgttctatttcctctgaaggatacattctttaaacctttgggaaattcattcatagtcttcctcctttgaaggattactctctggacacaaagtgtttgattctgatttgttggttggaagatgtgttggttgagagaaagattctgatttgttggttgaaaatagactcatcaagatcaactgctgtagtagtaaatattttgacattttgtctgtattcctgtgctgccctcacaagctgcatcaccttgagtgagtcattcatacttttttgtttgtttttgttttggagatggagtcttactctgttgcctaggctggagtgcggtggcgtgatcttggctcactgcgacctccatctcctgggttcaagtgatcctcctgcctcagcctcccgagtagctgggattacaggcacatgccaccatccctgctaatttttgcattttcagtagagacggagtttcaccatgttggtcaggttggtcttgaactcctgacctcaggtgatccgcccacctcagcctccccaagtgctgggattacaggtgtgagccaccgtgcccagcccagccatcatttttgaaacacgtttgagaaatagtgtcttcctttgagggccaaggagacattttttttgtttatttgtttgtttttgtgaggactagctgaagggggtgatgtatattaacctgcctacttatttgcctcttcccagagtgtgatgaatattagggtttaaagtttctgaagcatttgttaataaagcccggggctggaggtcagaagacctggatttctctgcatacttttgccatcagcaagctgtgtgaccttggacagatcccttttttgtctaaatctttctgagtcttcttgaaaacaatgccaggttgggacaggatgattgccaagctcccgtccagctctaaaacactgcaacgtatgcttctgcaccagcactgtccatcctgtagatcatgcagaaattctcttcaactttttcctacccataaaataggagcatgcttacctttttcctaatgttccaggccccgggtctagatattgtaagtaaggaagttaatgtgtatcagagcccattatgggccagaagttctcctcttccttcctacacctgcttcctccctccctccctccctctttcccttccttccttccatccatttgtgaagaagacatgatcaccctcattctgagagtgaagagacagaggctcaactaatgaaatgatttgttcaaggtcacacgggtggcacaaggcaagtggcagaggttgaatttagacccattcctgtccaaatgctgagtttatgtcatcgtcccgagaccataactttaaagatgtaagatagtgggaaaagagttgatttcaaagcacctctcagaaggactcactttacatcaggggtcagcagactcaggccaaatccggtccattccccgcttttgcaaagaaagttgtagtggaacacagctaggcttattgatttatggattgccaacgtccttttgtgaaacagacagctgagctgagtaatcgtggcgcacaaaacctaaaatatttactatctcgtcctttacagaatgtttgccaatctatggtccggagtccaaggctgtccatttttcaaagaacacaaagtgacatgagactgtcccatgtgcagggagccctatcattttattatgaaaaaacggcctttctgctcaaatctgttttttaaaaagtcaacaaacagactctgggtacctgtcaggaacagtagggagtttggtttccattgtgctcttcttcccaggaactcaatgaaggggaaatagaaatcttaattttggggaaattgcacaggggaaaaaggggagggaatcagttacaacactccattgcgacacttagtggggttgaaagtgacaacagcaagggtttctctttttggaaatgcgaggagggtatttccgcttctcgcagtggggcagggtggcagacgcctagcttgggtgagtgactatttctttataaaccacaactctgggcccgcaatggcagtccactgcttgctgcagtcacagaatggaaatctgcagaggcctccgcagtcacctaatcactctcctcctcttcctgttccattcagagacgatctgccgaccctctgggagaaaatccagcaagatgcaagccttcaggtaaggctaccccaaggaggagaaggtgagggtggatcagctggagactggaaacatatcacagctgccagggctgccaggccagagggcctgagaactgggtttgggctggagaggatgtccattattcaagaaagaggctgttacatgcatgggcttcaggacttgtgtttcaaaatatcccagatgtggatagtgcgaccggagggctgtcttactttcccagagactcaggaacccagtgagtaatagatgcatgccaaggagtgggactgcgattcaggcctagttgaatgtgctgacagagaagcagagaggggcaccaggggcacagcccgaaggcccagactgatatgggcaaggcctgtctgtgctgacatgtcggagggtcccactctccagggaccttggtttccccgtctgtgacatctgtgacatgagagtcacgataactccttgtgtgccttacagggttgttgtgaaaattaaatgcacagataatagcgtaacagtattccgtgcattgtaaagagcctgaaaaccattatgatttgaaaatggaatcggctttgtgagaccatcactattgtaaagatgtgatgctgatagaaatgacaggactgcttgtgcatgccctctgcagtgtgacattccagcagtgaaatcatgttggggtgacttctcccccactctgacctttatgtttgtctgggccgaggctgcaagtcgggctctgtgggtgtatgagtgacaagtctctcccttccagatatggggactgtctgcttccctaggttgcctctccctgctctgatcagctagaagctccaggagatcctcctggaggccccagcaggtgatgtttatccctccagactgaggctaaatctagaaactaggataatcacaaacaggccaatgctgccatatgcaaagcactttggtttgcctggccacccctcgtcgagcatgtgggctcttcagagcacctgatgaggtgggtacagttagccacacttcacaggtgaagaggtgaggcacaggtcccaggtcaggctggccggagctctgtttattacgtctcacagctttgagtcctgctctcaaccagagaggccctttaccaagaagaaaggattgggacccagaatcaggtcactggctgaggtagagaggaagccgggttgttcccaagggtagctgctcctgcaggactctgagcaggtcaccagctaatggaggaaaggctctagggaaagacccttctggtctcagactcagagcgagttagctgcaaggtgttccgtctcttgaaacttctacctaggtgctatggtagccactagtctcaggtggctatttaaatttatacttaaatgaatgaaaatagaagaaaatttaaaatccagacccttggtcacactatccacatttaaagaggtcaatagccacatgtggttagtggccaccctattgggcagtgcagctacagaacatttttgcatcccagaaagttcttttggatgttgctgctctacagcatgctttgctgaaacagaagtgccttccctgggaatctcagatgggaagcaagtaaggaggggagtcaaatgtgggctcactgctcaccagctgtgagggttgggcctgcctcttaaccattgtcagcctcagtcttctcatccatgcatgccgtgggtatactaaaatactatacccctggaagagctggatgcaaatttgacaagttctgggggacacaggaaggtgccaagcacaaggctgggcacatggtggctgtgcactacagctgagtccttttccttttcagaatctgggatgttaaccagaagaccttctatctgaggaacaaccaactagttgctggatacttgcaaggaccaaatgtcaatttagaaggtgagtggttgccaggaaagccaatgtatctgggcatcacgtcactttgcccgtctgtctgcagcagcatggcctgcctgcacaaaccctaggtgcaatgtcctaatccttgttgggtctttgtattcaagtttgaagctgggagggcctggctactgaagggcacatatgagggtagcctgaagagggtgtggagaggtagagtctaggtcagaggtcagtgcctataggcaagtggtcccagggccacagctgggaagggcaaataccagaaggcaaggttgaccattcccttcctcaagtgcctattaaggctccatgttcctatgttgttcaaaccctaactcaatcccaaattaatccaccatgtataaggttgagctatgtctcttattcctggacaccatactcagccatatctggtccacacattaacagctggatgaccttgaagaagcttcacccactctgttcctcagctttcccttcagtgggatgatatcaactggacaacaggatgtgcgattcttttagttccagccttccaggatgttttcactcccctgtttgttgttgtaggatggtattacctccaccttcccaccttccctatgccctggttctgtctcctgtgcctcgctctgaaagtggatgagacctacaattcctgtcctggtagttctcctaatgaacacactgaagcacgaggaagctgagatttttgttgctacatgagagcatggaggcctcttagggagagaggaggttcagagactcctaggctcctggtggagccccactcatggccttgttcattttccctgcccctcagcaacactcctattgacctggagcacaggtatcctggggaaagtgagggaaatatggacatcacatggaacaacatccaggagactcaggcctctaggagtaactgggtagtgtgcatcctggggaaagtgagggaaatatggacatcacatggaacaacatccaggagactcaggcctctaggagtaactgggtagtgtgcatcctggggaaagtgagggaaatatggacatcacatggaacaacatccaggagactcaggcctctaggagtaactgggtagtgtgcatcctggggaaagtgagggaaatatggacatcacatggaacaacatccaggagactcaggcctctaggagtaactgggtagtgtgcttggtttaatcttctatttacctgcagaccaggaagatgagacctctctgcccttctgacctcgggattttagttttgtggggaccaggggagatagaaaaatacccggggtctcttcattattgctgcttcctcttctattaacctgaccctcccctctgttcttccccagaaaagatagatgtggtacccattgagcctcatgctctgttcttgggaatccatggagggaagatgtgcctgtcctgtgtcaagtctggtgatgagaccagactccagctggaggtaaaaacatgctttggatctcaaatcaccccaaaacccagtggcttgaaacaaccaaaattttttcttatgattctgtgggttgaccaggattagctgggtagttctgttccatgtggtggaacatgctggggtcactttggaagctgcattcagcagagtgccaggcttgcgctgggcatccaaggtggtccctcatcctccaggctctctttccatgtgatctctcagtgtttaagagttagttggagcttccttacagcatggcggctgacttccaaaagggattattccaaaaagagcctcaacatgcaggcgcttattatgacttctgcttgcatcatcctattggccaaagccagtcacgtggctaagtctagccccctgtgagaggagactgcataagagtgtgaacaccaggagacacggtcactgggggccaccactgtaaccatctaccacaggacctgaatctctgtgtgctactcccttgctcaagggcccccctacccacgcagacctgctgtcttctagcaaagcccatcctcaggacctttctcttccaatccttattgactcaaattgattagttggtgctccacccagagccctgtgctcctttatctcatgtaatgttaatgggtttcccagccctgggaaaacatggctttgtctcaggggcttgctggatgcaaccttaacctcaatgtgagtggccatactgtggcactgtcccatccctcaccagggacactgttctggagggtgactgcctgttctgtgaggagtggggatggctaggacattgcatggaacacaccaccaccccatcttctcagagctcaaaccctgacagaacaccagctccacaggccttggcttctgctgatggtgccgtgtatttaccagacttagtggtccaaggccagagtggcagatttcccaaagtcaaggtgtgacagtgggacagcctctttgtgtctttgctgtcctaagaaacctgggccaggccaggcgcagtggctcacgccttgtaatcccagcactttgagaggccaaggtgggcagatcacgaggtcaggagtttgagaccagcctggccaacattggtgaaaccctgtctctattaaaaatagaaaacattagacaggtgtggtggtgcatgcctgtaatcccagctactcaggaggctgaggcaggagaatcgcttgaacccaggaggtggaggttgcagtgagccgagattgtgccactgcactccagcctaggcgacagagcaagactccgtctcgggaaaattaattaataaataaataaacctaggtcccagagtcccacagaatggcagacaggagcacctgggggcttttagggtatggcatttcccctgtactaactctgggctgtccagaggcgatttcatggcgtggagtggagagggaggcagcacaggacttcctaggcctcagctctcacctgcccatcttttgatttccaggcagttaacatcactgacctgagcgagaacagaaagcaggacaagcgcttcgccttcatccgctcagacagtggccccaccaccagttttgagtctgccgcctgccccggttggttcctctgcacagcgatggaagctgaccagcccgtcagcctcaccaatatgcctgacgaaggcgtcatggtcaccaaattctacttccaggaggacgagtagtactgcccaggcctgcctgttcccattcttgcatggcaaggactgcagggactgccagtccccctgccccagggctcccggctatgggggcactgaggaccagccattgaggggtggaccctcagaaggcgtcacaacaacctggtcacaggactctgcctcctcttcaactgaccagcctccatgctgcctccagaatggtctttctaatgtgtgaatcagagcacagcagcccctgcacaaagcccttccatgtcgcctctgcattcaggatcaaaccccgaccacctgcccaacctgctctcctcttgccactgcctcttcctccctcattccaccttcccatgccctggatccatcaggccacttgatgacccccaaccaagtggctcccacaccctgttttacaaaaaagaaaagaccagtccatgagggaggtttttaagggtttgtggaaaatgaaaattaggatttcatgatttttttttttcagtccccgtgaaggagagcccttcatttggagattatgttctttcggggagaggctgaggacttaaaatattcctgcatttgtgaaatgatggtgaaagtaagtggtagcttttcccttctttttcttctttttttgtgatgtcccaacttgtaaaaattaaaagttatggtactatgttagccccataattttttttttccttttaaaacacttccataatctggactcctctgtccaggcactgctgcccagcctccaagctccatctccactccagattttttacagctgcctgcagtactttacctcctatcagaagtttctcagctcccaaggctctgagcaaatgtggctcctgggggttctttcttcctctgctgaaggaataaattgctccttgacattgtagagcttctggcacttggagacttgtatgaaagatggctgtgcctctgcctgtctccccaccaggctgggagctctgcagagcaggaaacatgactcgtatatgtctcaggtccctgcagggccaagcacctagcctcgctcttggcaggtactcagcgaatgaatgctgtatatgttgggtgcaaagttccctacttcctgtgacttcagctctgttttacaataaaatcttgaaaatgcctatattgttgactatgtccttggccttgacaggctttgggtatagagtgctgaggaaactgaaagaccaatgtgtyttycttaccccagaggctggcgcctggcctcttctctgagagttcttttcttccttcagcctcactctccctggataacatgagagcaaatctctctgcgggg

SEQ ID NO: 1753 - DNA, 4249 bp, Homo sapien
gggaaagcgaggagccgcggcggcgtggagccggcgggcccgggcgggggctccccggagccctaccaccccaccctgggcatctacgcccgctgcatccggaacccaggggtgcagcacttccagcgggacacgctgtgcgggccctacgccgagagcttcggcgagatcgccagcggcttctggcaggccacagctattttcctggctgtgggaatctttattctctgcatggtggccttggtgtccgtcttcaccatgtgtgtacagagcatcatgaagaaaagcatcttcaatgtctgtgggctgttgcaaggaattgcaggtctattccttatcctcggtttgatactctaccctgctggctggggttgccagaaggccatagactactgtggacattatgcatctgcctacaaacctggagactgctccttgggctgggccttttataccgccattgggggcacagtcctcactttcatctgtgctgtcttctctgcacaagcagaaattgcaacctctagtgacaaagtacaggaagaaattgaagaggggaaaaacctgatctgcctcctttagtttggaagagacaatgccattttctcccttgagtaatcttgtgaaacagtccacagtttcatcatttgagtcaagtggagaactaacctttacctaccaaagccacgttccacggcccgaggcttaaacaggaccaatgagaggccacatccagctacgcaaagttactggacatgcggtctgcagtgcacattataaggaatggaacatgaaaatagtatataatcctagacctggagttgccaagttctgtcagactccatctcccccaggttcaatgatggatgataatctaaatcattagggcagcagtttctctggtaacggaagagaccgtccgccagatctgcaggctgtttctgctccaacactgcttgcttgtgagcatctctgcctcagaatggggttttgggttggagttcttgttttcctctgttctttcaagttgtctccaacgaacagaaaactataaacttactggggacaggatgtgtgctaaagggcacagcaagacactgtcttttgcttagctgaccaaaggggtcagcagggatggcgtggagtcatgctgtggaacttattctaggctgaatcctagggtaaggtggatcaactgaactgtcactccagagattttagaaatttgagtaaagaaacaataaggacctatacaatcatatgagaacaaaaatatgaaatcttgctagtgaagacgtattttttcttcttcccagcagccaggctagcaccagttctggcccagtctcctcttcttctggagatcacatgtttttcttctaaggttaggattgtgctttgactgcgaaaggaaacctcactgtttcctccttccagggactgaggtctccaagctagctgtggcttatgcagatgttcactgggaggacctgccagaatctcggcacttggggggagacctttactcccagtttggtgaccatgctgtagtcagctctatttccaatcccgacagtagcagaatggcattctacaacaaaaagaagctagttatgggagttaagtttttgtagttactggtgttgatcctgaaagcagactgagataacattaaattgctgcaactgaagaactgcagccaagaccttaattccaggaaagcacagaggacaaagttaattcaaaaagaggcgctagatcaaggtcacagcactgcctacacctgtttacaaaaagaatcaaataccactatgaataaggattcaggggtttttaatctactttccataaattaccaatatcactgattcaggaagatagtatctcagaatgaccagagcagcacagaaacaagctactctgacattatgggagcttcaaaattgtatcatgatacagaaacactccttagcactttaagaaagtgagatggaactgccagatttctggaaggagaaaaagtgtaggtatttgggttcattaatctgctcacttgaggactttgttttgaaaaagtaccttctgtggacaaggtattgtgctaccagctatacaaccctgacttcagagtttgcaaccttgccctgagtgaatcatgttaaagctgtctgagtctaaagcaccgtatcttggtgcagaacagataattatacagagatggaatgggacaaccgcagttttactacattctggtgtttggcctatatgagaaaccatcttctcacagattaagggctaagggcaaaaggggtgggaggtgtggaactagccttaatgagtttcccattcctgaaccaaaattcaaagtgagtgagatgtaaatcctgtgattttggtgaagaaaaaaacgggtatcttcatagcagcctaggaaaccttaaccatatctctaacaccacacagaaagaggctggaggagccactggacaaagcttctgtctctgtgtgtacatttataatgttctaaccaagtctcaaaccttgatgaaaaacacaaaatttttccataaacttatcagaagactcacttttctttctttcttggatagagaaaccattttctgacactaggtttacaatctcagtgtccttacaagttaagtcctaagctcacaggatcctccgagcatgtccatcacctgctctttggctaaggtggcagtgtacctctagatcaacctgggaacagtcacaagggagtgtgacttcttggccataataaactcactcgatagtgtttatgttattaatctgaatgcaacagaagacaaaagcacaggcatgcacacacacagaaccccaaaccactaaaaactacctaaacactgacttagtaaatagtaaaaaggtaatgttgggacttttaaaccttgaatccattagccaggcttgggatgaaaggaccatctaaaatcatgctagtctaaaccatgctcttccacacagctgtttaaaaaccactgggtatgaggaatatgctagaaagaaatgttaaaaatagattgttggctcacacttatttttctaataaataggaccattattactaccaggaaagtcttatttattttgcctgaaattggcttaaagaaagtctcatgacgggatgggatgggctgcgcttctcaatgaactctgaggcagaaatatttgccttggattctgtggattctttaaacctgtgtgctaataattcaaacaatgttgcattaattgtataagggtttttgtatagttttcaaacatctgtggtgtaatgatctttgttaaacatatattctgtaaagtgccatagtctttttttatgtgtagcatatttaaaaatatatatgtatattatacatacacaagtttgtgtgaaagatgtgcaataacaaaggtgtatgtatgttttgttgttttgttttggaaactggacaggagtcaaaacagggatgtttgtttctgttttggcaaaggagagttccacatttttgccttcatggcttattcagtaacccataattttaatgctacacaaatcttatgtgaagaaaagactggtatgaaatcattttttcctgggtctaaaataatcgctagtgttatgtcaaagttaagcccgcacgccaggcccagttaatgctagtctttcatgtgaaatgtgaagctgccatgttgccttttctcttagtaggataactagtagctggtacataatcactgaggagctatttcttaacatgcttttatagaccatgctaatgctagaccagtatttaagggctaatctcacacctccttagctgtaagagtctggcttagaacagacctctctgtgcaataacttgtggccactggaaatccctgggccggcatttgtattggggttgcaatgactcccaagggccaaaagagttaaaggcacgactgggatttcttctgagactgtggtgaaactccttccaaggctgagggggtcagtaggtgctctggagggactcggcaccacttgatattcaacagccacttgagccaaatataaaattgtatttacagctgatggactcaatttgagccttcaaacttgtagttatcctattatattgtaaactaatacattgtctagcattgatttggttcctgtgcatatgtattttcactatgtgctcccctccccagatcttaattaaaccagattttgcaattc

SEQ ID NO: 1754 - protein, 193 aa, Homo sapien
GKARSRGGVEPAGPGGGSPEPYHPTLGIYARCIRNPGVQHFQRDTLCGPYAESFGEIASGFWQATAIFLAVGIFILCMVALVSVFTMCVQSIMKKSIFNVCGLLQGIAGLFLILGLILYPAGWGCQKAIDYCGHYASAYKPGDCSLGWAFYTAIGGTVLTFICAVFSAQAEIATSSDKVQEEIEEGKNLICLL

SEQ ID NO: 1755 - DNA, 1716 bp, Homo sapien
ggcacgaggggaagacctcctgtcctatcaggccctccccatggctttagagacgatctgccgaccctctgggagaaaatccagcaagatgcaagccttcagaatctgggatgttaaccagaagaccttctatctgaggaacaaccaactagttgccggatacttgcaaggaccaaatgtcaatttagaagaaaagatagatgtggtacccattgagcctcatgctctgttcttgggaatccatggagggaagatgtgcctgtcctgtgtcaagtctggtgatgagaccagactccagctggaggcagttaacatcactgacctgagcgagaacagaaagcaggacaagcgcttcgccttcatccgctcagacagtggccccaccaccagttttgagtctgccgcctgccccggttggttcctctgcacagcgatggaagctgaccagcccgtcagcctcaccaatatgcctgacgaaggcgtcatggtcaccaaattctacttccaggaggacgagtagtactgcccaggcctgcctgttcccattcttgcatggcaaggactgcagggactgccagtccccctgccccagggctcccggctatgggggcactgaggaccagccattgaggggtggaccctcagaaggcgtcacaacaacctggtcacaggactctgcctcctcttcaactgaccagcctccatgctgcctccagaatggtctttctaatgtgtgaatcagagcacagcagcccctgcacaaagcccttccatgtcgcctctgcattcaggatcaaaccccgaccacctgcccaacctgctctcctcttgccactgcctcttcctccctcattccaccttcccatgccctggatccatcaggccacttgatgacccccaaccaagtggctcccacaccctgttttacaaaaaagaaaagaccagtccatgagggaggtttttaagggtttgtggaaaatgaaaattaggatttcatgatttttttttttcagtccccgtgaaggagagcccttcatttggagattatgttctttcggggagaggctgaggacttaaaatattcctgcatttgtgaaatgatggtgaaagtaagtggtagcttttcccttctttttcttctttttttgtgatgtcccaacttgtaaaaattaaaagttatggtactatgttagccccataattttttttttccttttaaaacacttccataatctggactcctctgtccaggcactgctgcccagcctccaagctccatctccactccagattttttacagctgcctgcagtactttacctcctatcagaagtttctcagctcccaaggctctgagcaaatgtggctcctgggggttctttcttcctctgctgaaggaataaattgctccttgacattgtagagcttctggcacttggagacttgtatgaaagatggctgtgcctctgcctgtctcccccaccaggctgggagctctgcagagcaggaaacatgactcgtatatgtctcaggtccctgcagggccaagcacctagcctcgctcttggcaggtactcagcgaatgaatgctgtatatgttgggtgcaaagttccctacttcctgtgacttcagctctgttttacaataaaatcttgaaaatgcctaaaaaaaaaaaaaaaaaaaaaaaaaaaaaaaaaaaaaaaaaaaaaaaaaaaa

SEQ ID NO: 1756 - protein, 159 aa, Homo sapien
MALETICRPSGRKSSKMQAFRIWDVNQKTFYLRNNQLVAGYLQGPNVNLEEKIDVVPIEPHALFLGIHGGKMCLSCVKSGDETRLQLEAVNITDLSENRKQDKRFAFIRSDSGPTTSFESAACPGWFLCTAMEADQPVSLTNMPDEGVMVTKFYFQEDE

SEQ ID NO: 1757 - DNA, 240 bp, Homo sapien
cttctagatcatcataagactacagagcacttttcaaagctcatgcatgttcatcatgttagtgtcgtattttgagctggggttttgagactccccttagagatagagaaacagacccaagaaatgtgctcaattgcaatgggccacatacctagatctccagatgtcatttcccctctcttattttaagttatgttaagattactaaaacaataaaagctcctaaaaaatctaaaaaaa

SEQ ID NO: 1758 - protein, 24 aa, Homo sapien
LLDHHKTTEHFSKLMHVHHVSVVF

SEQ ID NO: 1759 - DNA, 939 bp, Homo sapien
gggcttcctggggagggtgtggcagggtggtgggcatcccctccctcaccaaagcatgggctctttgtttcctctttgccaggcctgggtccttcccagtgacccctcagccttcacttcctcctcactcccggggagctgtgacaggtgtttgggggaggggaggggggtatgataagctgggacagctgcacccaccggtgctctggtgagatggggggcccggatgttggggagacacatctgctgggttcccagcccaaggtccccaaccctggctgtctggccttgtctgtcaccccccgtgcccactggcagggacaggaagctccccccccaccccgctttgggcagtttgccttggcacgggcctgatctgttttcctccccagagcagctgctgttctgtctgctgggcagagggctgggttcctccgaggtaggcaggggcctcaacccagagcccctctcacaccctctttcaactcaggcttatgtctctccctcctcccccacccccaccccaggaagaggagatcccagaactggagattgacgtggatgagctcctggacatggagagtgacgatgcccgggctgccagggtcaaggagctgctggttgactgttacaaacccacagaggccttcatttctggcctgctggacaagatccggggcatgcagaagctgagcacaccccagaagaagtgagggtccccgacccaggagaacggtggctcccacaggacaatcgctgccccccaacctcgtagcaacagcaataccgggggaccctgcggccaggcctggtgccatgagcagggctcctcgtgcccctggcccaggggtctcttcccctgccccctcagttttccacttttggggttttttattgttattaaactgatgggactttaaaaaaaaaaaaaaaaaaaaa

SEQ ID NO: 1760 - protein, 109 aa, Homo sapien
MLGRHICWVPSPRSPTLAVWPCLSPPVPTGRDRKLPPHPALGSLPWHGPDLFSSPEQLLFCLLGRGLGSSEVGRGLNPEPLSHPLSTQAYVSPSSPTPTPGRGDPRTGD

SEQ ID NO: 1761 - DNA, 628 bp, Homo sapien
  Unsure 149-171: Unknown base
ctttcttaaaaaatatatcttcatatccataacttttttcacatctctctctctccctttcggtattctatttctttccatatccatattttgaaatagcctttaaataacctctacgttagacaaaattattctttaaaaaatttttnnnnnnnnnnnnnnnnnnnnnnngtgtaagtggattaaaagagaaacttggtctagttcataatatttttaatagggctttccctggctgctggaaaacttaggccagtaagcatctctttgtttaaagtcctacaagacaatttgaaataattcattgttcatgccaaaattctaagtactgtttttcttagcaagtgtaacataatcaggaacaatgggtacaagtaaaacattctttggatgatattcaaagccttattagcactgcacctgaataataggtcattttgcctcactcatttgccaaagtagccatttctaagttaaggaagtttttagataggctcatagccttgtatttcgttttagattgtaagctcaatggcagggatactatattggtaattatgttttcatatagcaaccaccacagtatattcttggtgcttaataaatgtttataattgttaacaataaa

SEQ ID NO: 1762 - protein, 30 aa, Homo sapien
FLKKYIFISITFFTSLSLPFGILFLSISIF

SEQ ID NO: 1763 - DNA, 1620 bp, Homo sapien
atggcggcggcattacgggtggcggcggtcggggcaaggctcagcgttctggcgagcggtctccgcgccgcggtccgcagcctttgcagccaggccacctctgttaacgaacgcatcgaaaacaagcgccggaccgcgctgctgggagggggccaacgccgtattgacgcgcagcacaagcgaggaaagctaacagccagggagaggatcagtctcttgctggaccctggcagctttgttgagagcgacatgtttgtggaacacagatgtgcagattttggaatggctgctgacaagaataagtttcctggagacagcgtggtcactggacgaggccgaatcaatggaagattggtttatgtcttcagtcaggattttacagtttttggaggcagtctgtcaggagcacatgcccaaaagatctgcaaaatcatggaccaggccataacggtgggggctccagtgattgggctgaatgactctgggggagcacggatccaagaaggagtggagtctttggctggctatgcagacatctttctgaggaatgttacggcatccggagtcatccctcagatttctctgatcatgggcccatgtgctggtggggccgtctactccccagccctaacagacttcacgttcatggtaaaggacacctcctacctgttcatcactggccctgatgttgtgaagtctgtcaccaatgaggatgttacccaggaggagctcggtggtgccaagacccacaccaccatgtcaggtgtggcccacagagcttttgaaaatgatgttgatgccttgtgtaatctccgggatttcttcaactacctgcccctgagcagtcaggacccggcttccgtccgtgagtgccacgatcccagtgaccgtctggttcctgagcttgacacaattgtccctttggaatcaaccaaagcctacaacatggtggacatcatacactctgttgttgatgagcgtgaattttttgagatcatgcccaattatgccaagaacatcattgttggttttgcaagaatgaatgggaggactgttggaattgttggcaaccaacctaaggtggcctcaggatgcttggatattaattcatctgtgaaaggggctcgttttgtcagattctgtgatgcattcaatattccactcatcacttttgttgatgtccctggctttctacctggcacagcacaggaatacgggggcatcatccggcatggtgccaagcttctctacgcatttgctgaggcaactgtacccaaagtcacagtcatcaccaggaaggcctatggaggtgcctatgatgtcatgagctctaagcacctttgtggtgataccaactatgcctggcccaccgcagagattgcagtcatgggagcaaagggcgctgtggagatcatcttcaaagggcatgagaatgtggaagctgctcaggcagagtacatcgagaagtttgccaaccctttccctgcagcagtgcgagggtttgtggatgacatcatccaaccttcttccacacgtgcccgaatctgctgtgacctggatgtcttggccagcaagaaggtacaacgtccttggagaaaacatgcaaatattccattgtaa

SEQ ID NO: 1764 - protein, 539 aa, Homo sapien
MAAALRVAAVGARLSVLASGLRAAVRSLCSQATSVNERIENKRRTALLGGGQRRIDAQHKRGKLTARERISLLLDPGSFVESDMFVEHRCADFGMAADKNKFPGDSVVTGRGRINGRLVYVFSQDFTVFGGSLSGAHAQKICKIMDQAITVGAPVIGLNDSGGARIQEGVESLAGYADIFLRNVTASGVIPQISLIMGPCAGGAVYSPALTDFTFMVKDTSYLFITGPDVVKSVTNEDVTQEELGGAKTHTTMSGVAHRAFENDVDALCNLRDFFNYLPLSSQDPASVRECHDPSDRLVPELDTIVPLESTKAYNMVDIIHSVVDEREFFEIMPNYAKNIIVGFARMNGRTVGIVGNQPKVASGCLDINSSVKGARFVRFCDAFNIPLITFVDVPGFLPGTAQEYGGIIRHGAKLLYAFAEATVPKVTVITRKAYGGAYDVMSSKHLCGDTNYAWPTAEIAVMGAKGAVEIIFKGHENVEAAQAEYIEKFANPFPAAVRGFVDDIIQPSSTRARICCDLDVLASKKVQRPWRKHANIPL

SEQ ID NO: 1765 - DNA, 1888 bp, Homo sapien
tggggtcaaagctcgccagtacccttggggtgttgtacaagtggaaaatgaaacccactgtgactttgtaaagctgcgggaaatgctcatttgtacaaatatggaggacctgcgagagcagacccataccaggcactatgagctttacaggcgctgcaaactggaggaaatgggctttacagatgtgggcccagaaaacaagccagtcagtgttcaagagacctatgaagccaaaagacatgagttccatggtgaacgtcagaggaaggaagaagaaatgaaacagatgtttgtgcagcgagtaaaggagaaagaagccatattgaaagaagctgagagagagctacaggccaaatttgagcaccttaagagacttcaccaagaagagagaatgaagcttgaagaaaagagaagacttttggaagaagaaataattgctttctctaaaaagaaagctacctccgagatatttcacagccagtcctttctggcaacaggcagcaacctgaggaaggacaaggaccgtaagaactccaattttttgtaaaacagaggttccagagcacagaaggtcatcatcacaagcaaactttattaaaaaaaaactagaagtgtgctttgattttgctgttatttgttttatcacttctatatttggtgaacagccacagttactgatatttatggaaaagtactttcaagtacaaggtcaatacataagccggagtgaatgatactacgagttgagcatctctaattcaaaaatctgaaatccagaagcttcaaaatctgaactttttgagcactgacttgaccccacaagtggaaaattccccacccgacacctttgctttctgatggttcagtttaaacagattttgtttcttgcacaaaatttttgtataaattactttcaggctatatgtataaggtggatgtgaaacatgaattatgtaattagagtcgggtcccgttgtgtatatgcagatattccaaacctgaaatccaaaacacttctggtccctagcattttggataagggatactcagcttgtacctatatattcatatatattcactgttgttagaaatgtttaagttgctgttctgtgatgaatctaaatcttttctcttgctaccaagctattgtcactgcagtgcattataccaaagagcgaagtcagtgccgctgaaaatacagaacccattaatatcgtggctatctgattacatttatattccaagatgaaccttttttatatatgctaaaaattttggggaatatgttttgggatgtattatggagctaaaactctaacctcttaatagttttatagaacttaaaaattttttatacaattacccaattggtgatatgatcttaagcttttgtgtcagattatttaatatgatgacttcatgctttattatgccttattatggctgacgtattactgtggtgaaacaaaatatctttaaaagttaaaacatccagatatataagctattttttcctaaggataaagtacctttgagcatgagtgtatcacagctttcattaggaaaacttttcattacatacttgtttaaactctgtcttccagggtaaaaataataaggttgaatcattttattaaaaatactttttaagaaaataactatgaacatctgaatattaaagatataaaaatgcacataattcatatttcaggtggtatttgcattcagtgccttactggtattctcagaacattttaatgatttctaacatttcttaacagtcatagatatatacattttcattttttgtacttgaatattctaaataaaactgacatttactcttgacaaataaaacatatatttaccaaaaaaaaaaaaaaaaaaa

SEQ ID NO: 1766 - protein, 181 aa, Homo sapien
GVKARQYPWGVVQVENETHCDFVKLREMLICTNMEDLREQTHTRHYELYRRCKLEEMGFTDVGPENKPVSVQETYEAKRHEFHGERQRKEEEMKQMFVQRVKEKEAILKEAERELQAKFEHLKRLHQEERMKLEEKRRLLEEEIIAFSKKKATSEIFHSQSFLATGSNLRKDKDRKNSNFL

SEQ ID NO: 1767 - DNA, 6740 bp, Homo sapien
gatctccacaagaaacccatacagatgagtgcacatttggccatgatcgataccctcatgatggcttatactgtaaaaatggtcagtatagaaaaagtaattgcgtgtgctcagcagtattcagctttttttcaagccacagatctgccctatgatattgaggacgctgtcatgtactggataaataaggtaaatgaacatttgaaagacataatggaacaagaacaaaaactgaaagaacatcacacagttgaagctccaggaggtcaaaagtctccttccaaatggttttggaaactggttccagctcgttatcggaaagagcaaacattgcttaagcaactgccttgcattccattggtagaaaatttgttgaaggatgggacagatggctgtgcattagctgcccttattcatttttactgtcctgatgttgtcagattagaggatatttgtttgaaagaaactatgtctttggctgatagcctgtataatctgcagctgattcaagaattttgccaagaatacttgaaccagtgttgccatttcactctggaagatatgctctatgctgcttcatccataaagagtaattatttggtgttcatggcggaactgttctggtggtttgaagtggtgaagccgtcttttgtacagcctcgtgttgttcgtccacaaggagctgaacctgtaaaagatatgccttcaattcctgtcttgaatgctgccaaaagaaatgtcttagatagtagttctgacttcccttcaagtggggaaggagctacatttacacagtctcatcatcatttgccttctaggtattcacgtccccaggctcattcttcagcctcaggaggaattagaaggtcttcatctatgtcttatgttgatggcttcatagggacatggcccaaagagaaaagatcatcagtgcatggcgtatcatttgatatttcttttgataaagaagatagtgtacagagatccactccaaaccgaggaatcactcgttctattagtaatgaaggacttactctgaacaacagtcatgtatctaaacacattaggaaaaatttgtccttcaagccaataaatggagaagaggaagcagagagcattgaagaagaacttaatatagattctcacagtgacctcaaatcttgtgtgccccttaacacaaatgaactaaattctaatgagaatattcattacaagcttccaaatggagctttacaaaatagaatacttcttgacgagtttggcaatcagatcgagacaccaagcattgaagaagcattacaaataattcatgatactgaaaaatctcctcatacacctcagccagaccaaattgctaatggcttctttcttcatagtcaagaaatgagtatcttaaattcaaatatcaagttaaatcaatctagtcctgataatgtaactgatacgaaaggtgccttgagtcccataactgacaatactgaagtagacactggaattcacgttccttcagaagatattcctgaaactatggacgaagattcttcgttgagagattatactgtaagcttggactctgacatggatgatgcatctaaatttcttcaggattatgatattcgaactggcaacaccagggaagctttgagtccttgtccaagtactgtaagtaccaagtctcagccaggcagcagtgcttcttctagttctggagttaaaatgaccagctttgctgaacaaaaattcaggaaactgaatcataccgatggaaaaagtagtggaagcagttctcaaaaaactacaccagaaggctctgaacttaatattcctcatgtggttgcttgggcacaaattccagaagaaacagggcttccacagggacgggacactacccagctgttggcctctgaaatggtgcatcttaggatgaaactagaagaaaagaggcgtgctatagaagcccagaaaaagaaaatggaagctgcttttaccaaacagagacagaaaatgggaaggacagcattccttactgtagtgaaaaagaaaggggatgggatatctcctctacgagaggaagcggcgggtgcagaagatgagaaagtatatactgatcgagcaaaagaaaaggaatcacaaaaaactgatggacaaaggagcaagtcactggcagatataaaagagagcatggagaatcctcaagccaaatggctaaagtctccaactacacctattgatcctgagaagcagtggaacctggcaagcccctcagaagaaactttaaatgaaggagagattttagaatataccaaatccattgaaaagttaaattcatccctgcattttctacaacaagaaatgcaacgcttgtcacttcagcaggagatgttaatgcagatgagagagcaacaatcttgggtgatttcacctccacaaccctctccacagaaacagattcgagattttaagccttctaagcaggcaggcctgtcatcagccattgcaccattctcctcagactcccctcgtcctactcacccatctccacagtcttctaacaggaaaagtgcatctttttctgttaaaagtcaaaggactcctaggccaaatgagttaaaaataacacctttgaatcgaaccttgacacctcctcggtctgtggatagccttcctcggttaaggaggttttcaccaagtcaagttcctattcaaactaggtcatttgtatgttttggggatgatggagaacctcagttaaaggaatccaaacctaaagaggaagttaaaaaggaggaattggaatccaaagggactttggaacagcgtggacataatccagaagaaaaggaaatcaaaccttttgagtcaacagtctctgaagtcctatcactgcctgtcacagagactgtatgtctgacaccaaatgaggaccaattgaatcaacccacagaaccccctcctaaacccgttttcccacccactgctccaaaaaatgttaatctgattgaagtttccctctcagatttgaaaccccctgaaaaggctgatgtacctgttgaaaaatatgatggagaaagtgataaagaacaatttgatgatgaccagaaagtatgctgtggattcttttttaaggatgatcaaaaagcagaaaatgatatggcaatgaaacgggcagctttgttggagaaaagattaagaagggaaaaggaaactcagctccggaaacaacagttggaagcagaaatggagcataagaaggaggaaacaaggcgtaaaactgaggaagaacgtcagaagaaagaagatgagagagcacgcagagaatttattaggcaagaatatatgaggcggaaacaactgaaactaatggaagatatggatacagtaattaaaccccgtcctcaagtagtaaaacaaaaaaaacagcgaccaaaatctattcacagagatcatattgaatcccccaaaacaccaataaagggtcctccagtctctagcctttctttggcatcgctgaacacgggtgataacgagagtgtacattcaggcaagaggacgccaagatcagagtctgtagaaggcttcttatctccaagtcgttgtggcagtcgaaatggagaaaaagactgggagaatgcatcaacaacttcttcagtggcttctggaacagaatatacaggaccaaagctctacaaagaacccagtgcaaaatccaataagcacataatacaaaatgctttagctcattgctgtttggctggaaaagtaaatgaaggtcagaagaaaaaaatactggaggaaatggagaaatcagatgccaacaacttcttaatcttgttccgggattcaggatgccagttcagatctttatacacttattgcccagaaactgaagaaatcaataaactgactgggataggccctaaatctatcactaaaaaaatgattgaaggactttacaaatataattctgacaggaaacagtttagccacatacccgctaaaactttatctgccagtgttgatgcaattaccattcatagccatttatggcagaccaaaagaccagtaacacccaaaaaacttttacccactaaggcatagaagttgggaaatacttgcttcagaacattcatggtaaatttgcacttcatctttcctgcctatagaaaatctttctaattgccaacaagacttttattaattaaaactggacattaagctctgttgtcatgaacaactggaatgtaaaccacagtattttggagtgcagaacattctcaattaagtgataagtccaaatgatgaaggaaatgttttaattcacaaatggagatttgtatgtgttatcaggttcacctgcttgatattagatacattaaagcactgaattttcatggatattagttggatttatcattgaaatatggttaagattacaaattatgtgttttatttgttgcttttttttaaccttttaatgtatattcttgtcttcagatggtttgctatttttctctcctgggggtttattctaagatacctttgtattttatttcatgtggagatcatgaaagtaggaaatatacctttagaagtaactcgcacctttcttatgatgttaagagaaacactagtgtttagttttacagtaaccctcatattttaatggtgttacagcatttgcaaaaattattctgctaagtatttacaactctatttattattcactcaagtattaacattctctattaaataagaggaggtgttgtaaagagctgctagtaggttcgctttaaaccacatgagcttaaccaagaatatgttatgagaagttgctgattaaatcagtgctgtttttacaccacttctggccaactcagaataatttagattgttcttttaacaaaaaaggctttctatctcttttaaagtaagtcactttataagttggcagaagtgaatgacactttgagagtagtctttcaatctgaagatgtaagacttcctgaaacaagttctcaagaagtctttacattatatttataactcatataaaaattatatttagaatttttaaacatgtacaaagggctacattttaattttaaaatagcttcacattattttacttatattgggtttttcttcattttaatccttttcaagtggaatggcttagaataagtatacacttgaaatctcctctacatgatctttgttctttaacagtgtataccagagggttagttggggaaaaacttcattctcaggaaaagacttgaatgattatgtgaccctgttatatttcagtgttgtgacaaatgtgtaaactagcgggggaagacagtattgtatcataaatgagatgcgtagtttgttttctttcatgggaagtagagataaaaatatatacatttctctaattgagttgtttagagaaagaactaatgtctcatatgatgtatttacttattttaaaaaaaagaataggaatgagatgtccctgagctgtacttttctattattataaggcctttaggcatcagtgcatctgggttatcaacattttctcaaatgctgtcaatattttactgtaatttatgttcttatatttatgtatatttgttaaaactgtaaaaaaatttcacagatttttttccaatacctgtgcaagatacatgtgtagctcaaaactatttgtgatctactgtttgcatgtaagagaccaggatatgtaactcttatattttaagtgtatacatattgtgtatataacatatggatattaaaaatggggaattgcacattttaccttttggacagtaatttctatcacagttagaaggaaatgatagtcaaatacacgtttagattaaaactagtttaaaaaattataaatgaatctaatcaaaatgtgaatagtagtcaaaaggataatttaataagcattttacgttactaaatttgttcatttcaatattaactaaatttccctcatcaaagcaatctttgtgatattacttcgctattaaataaagaaaattggatgcaagacaatggagaaactttaaaactaaacaggaccaccctttattcttaaatttgtgtgtgtccaacagttgaattgaatgtctataaggtctaaaggtagaatgtgaatattgccacagagttcattgctctcagtataagattttactttattaatgcagaaggaatatggatatatttctttaagtctgcagatttttttattatggtgcagcttttttttaattatgtttttaaaattatacagttgaaaaatatgccatttcataaagtctgaggattttcgtcaaccttactgaaacacactggtgctttcatcatcagaggtcaaattattatgataactattccattaagtttgccaaacatttgtcgtggttaccagtgcagcctgtcaaattctgctatttgacacagctttggaaagatttagttcttggtttttccgttttgtattagaatgactgttacagttttatttggctgtttaaagccaaattcagctatttaattatggtttcatggacactgttgagcaatgtacagtgtatggtgtgcttacctgtccactctagagcattgcttacaggttttttgttttttaagatgctgtgctgtaaaatactgtcatacttgctatttcctggtacagtgtagtttttcccctttcatttgaataaaagcatggcacc

SEQ ID NO: 1768 - protein, 856 aa, Homo sapien [sequence omitted]

SEQ ID NO: 1769 - DNA, 4246 bp, Homo sapien
tttaaactgtgctttctaagcacagtcaggtagcaaaagtaataaaaaggatggttgaacaagttttcttgtatgttccaggatatgtttgggacttttctttgtttattatatgagttgttccctttgaaattaaagctattttgtaggttttgtgggacataatttgataagtagagttaattaaatttcttctggaagagatctaaattcttattcttagtgagagactgtagttaaaaggaaggcttttagaacttgggttcaaggaagatggagatgcgtcggaagctctttggcgggggtgaggaagttcagaaagtgtgcattttccttctggcatttaggtcttgtccgtgtgatttggtggtgcttgggtcataagcctgattaaaattcagggacatgtaccacggcggccaaagcggaattaatttttttatatggggactggagcgctgaaaagttgttcctgaccaggctctaatgagaaattcctctctccccaggttatgaagacagtatggagtttccagaccatagtagacatttgctacagtgtctgagcgagcagagacaccagggttttctttgtgactgcactgttctggtgggagatgcccagttccgagcgcaccgagctgtactggcttcatgcagcatgtatttccacctcttttacaaggaccagctggacaaaagagacattgttcatctgaacagcgacattgttacagcccccgctttcgctctcctgcttgaattcatgtatgaagggaaactccagttcaaagacttgcccattgaagacgtgctagcagctgccagttatctccacatgtatgacattgtcaaagtctgcaaaaagaagctgaaagagaaagccaccacggaggcagacagcaccaaaaaggaagaagatgcttcaagttgttcggacaaagtcgagagtctctccgatggcagcagccacatagcaggcgatttgcccagtgatgaagatgaaggagaagatgaaaaattgaacatcctgcccagcaaaagggacttggcggccgagcctgggaacatgtggatgcgattgccctcagactcagcaggcatcccccaggctggcggagaggcagagccacacgccacagcagctggaaaaacagtagccagcccctgcagctcaacagagtctttgtcccagaggtctgtcacctccgtgagggattcggcagatgttgactgtgtgctggacctgtctgtcaagtccagcctttcaggagttgaaaatctgaacagctcttatttctcttcacaggacgtgctgagaagcaacctggtgcaggtgaaggtggagaaagaggcttcctgtgatgagagtgatgttggcactaatgactatgacatggaacatagcactgtgaaagaaagtgtgagcactaataacagggtacagtatgagccggcccatctggctcccctgagggaggactcggtcttgagggagctggaccgggaggacaaagccagtgatgatgagatgatgaccccagagagcgagcgtgtccaggtggagggaggcatggagagcagtctgctcccctacgtctccaacatcctgagccccgcgggccagatcttcatgtgccccctgtgcaacaaggtcttccccagcccccacatcctgcagatccacctgagcacgcacttccgcgagcaggacggcatccgcagcaagcccgccgccgatgtcaacgtgcccacgtgctcgctgtgtgggaagactttctcttgcatgtacaccctcaagcgccacgagaggactcactcgggggagaagccctacacatgcacccagtgcggcaagagcttccagtactcgcacaacctgagccgccatgccgtggtgcacacccgcgagaagccgcacgcctgcaagtggtgcgagcgcaggttcacgcagtccggggacctgtacagacacattcgcaagttccactgtgagttggtgaactccttgtcggtcaaaagcgaagcactgagcttgcctactgtcagagactggaccttagaagatagctctcaagaactttggaaataattttatatatatataaataatatatatatatatacatatatataaatagatctctatatagttgtggtacggtctaaaagcagtcttgtttcctggaaataaaaagttgggatattaacttgtttttgcactttagaatagcatgagaatctcactaatttagcattctgataaaagaaactttagagcaagtcagaatagagaggtgtttttcctttgaggggataggggaagtaagccaataagaaccttttaaacaaatcgtcctgtcacaaaatgctttcatatggcttaattttgtcaacactgcattgtcttttgagctcttttttcccccccaacaaagtttttttgttttttgtttttttttttaagtagaaattccctccagttttattagcctctttatatgtctcaaattgcatgaattttttctggctgttggaaacctgaatgcttttagacccaaatggaaaatttctgaaatgctggattatctatttttaaacaagcagttgacttaaaactttctgtggcaacttctggttttctgacagttcccagtgagagaaatgctgaaagtacactgggatcactgggacactgtcttatgaaggtttgcttgggatgaaaaaggatattgcagcttcagcagtgttgaactgtgtgtttaaaaatgtgaattactgttattgtatactgtaattgattacatgggctgggggggtgtcaaagaacttgacaggttgtgttgatgctcttagttgagtcttgaaaagtaaatattaacgctacagaaatgcatgagttttcaatatattttttgtctttgtttgcattgtataactttaacgagtgagtttaaaattatttaatttccttagaaaaatagcaccatttggaaaaaaaaactggtgttatgaagaacgtaaatgcactgtttttatttttattttatataatttaaattgactttcccactgtctttaagttgaaactgttaagctgaataaaaacttaagctgcaaattgataacttcgctacataacaaggaaaatataaatgtttacaaacagcttaaagatttgcatgtgcagtgtgcatttataacaaacttctaattgcacaaaacccatgccagctcagagtttaggtgtacacatttacccagttgagcgttcttagaataactactgcacaagttgacaataggtcgttctctctttttttttgtttgctccctttttctttttctccccttcctccttaccctccctcccttactctccccccccaccaccaccctccacccccaactcatgaaaagattctatggactgaaaaagccccaggctgaaaggactggactgccttgattgacatggggaagggggttagtagactatgtggattgcggcagcagaggctgcagcctaacgtgtggttttaatgaccagcacgcaaggcaaaagcattttgcacagtgtttgttttcctgtcttgcacttacaaataaggtctatgggagtagcatggaaaacgtttgctgtttttcccttttttttttaattgcttttgtttaaaatttgatcgccttaactactgtaaacatagcctatttttgtgcttaagatactgaatggaaaactccattgtgtgttgctggactgttttggaaatatttggttaaatgtgtgttaatttggctgtaatggcatttaaagcaaacaaacaaacaaaaaaagctgtgaaaatggccttggagcattatctttagttacttgaagagtttctagtttttttaaaatacagtttatgttaaaataatttttattaatttagagaagacaatcaatgtctgtgagaaaacggactttcttttggattttctttttgtggtcattgtgagtgattgctttttccttttcttagtttcacattcttcctttgttctaaaacttagactgacatctagctttgacaatcatagtatgttttattttcctgagggggaataacttataatgctgtttagttttgtactattggtgtgttggtgaatttttaaactgtgtgctaactgcaataaattatatgaactgagaaaaaaaaaaaaaaaaaaaaaaaaaaaaaaaaaaaaaaaaaaaaaaaaa

SEQ ID NO: 1770 - protein, 522 aa, Homo sapien
MEFPDHSRHLLQCLSEQRHQGFLCDCTVLVGDAQFRAHRAVLASCSMYFHLFYKDQLDKRDIVHLNSDIVTAPAFALLLEFMYEGKLQFKDLPIEDVLAAASYLHMYDIVKVCKKKLKEKATTEADSTKKEEDASSCSDKVESLSDGSSHIAGDLPSDEDEGEDEKLNILPSKRDLAAEPGNMWMRLPSDSAGIPQAGGEAEPHATAAGKTVASPCSSTESLSQRSVTSVRDSADVDCVLDLSVKSSLSGVENLNSSYFSSQDVLRSNLVQVKVEKEASCDESDVGTNDYDMEHSTVKESVSTNNRVQYEPAHLAPLREDSVLRELDREDKASDDEMMTPESERVQVEGGMESSLLPYVSNILSPAGQIFMCPLCNKVFPSPHILQIHLSTHFREQDGIRSKPAADVNVPTCSLCGKTFSCMYTLKRHERTHSGEKPYTCTQCGKSFQYSHNLSRHAVVHTREKPHACKWCERRFTQSGDLYRHIRKFHCELVNSLSVKSEALSLPTVRDWTLEDSSQELWK

SEQ ID NO: 1771 - DNA, 2457 bp, Homo sapien
gctgtttgtgatatagggtctgcctcctttaaatatgatatgcgccgactcagtgaaattctggcatttccaagagcatggtatagaagaagtattgcaagacgtctattccttggagaccaaactataaatttgccaacatctggcccagggacacctgattccattgaaggggtaagccaacacctttcccctgaatcatcaagaaaagcttactgcaagacctgggagcagccaagtcagtcagcctccttcacccacatgcctcagtcacctaatgtgttcaatgagcatatgacaaacagcaccatgtcaccagggacagtaggacagagcctaaaatccccagcttccataagatcaaggagtgtatctgattcttcagttcctcgaagagattcactttcaaaaacatcaactccttttaacaaatcaaacaaagcagcaagccaacaagggaccccatgggaaacacttgtcgtgtttgctatcaacttgaagcaattaaacgttcaaatgaatatgagtaatgtaatgggaaatacaacttggacaactagtggtttgaagagccagggccgtctgtcagtaggaagtaatcgtgatcgagagatcagcatgtctgttggtctgggaagatcacaattagattctaaaggaggagtagttggagggaccatagatgtcaatgctttggagatggttgctcatatttctgaacatccaaatcagcaacccagtcacaaaattcagattactatgggttctactgaagctcgtgttgattacatgggctcaagtatcctcatgggcatcttcagtaatgctgatcttaagcttcaggatgaatggaaagtaaacttgtataatacattggattcaagcataactgataaaagtgagattttcgtccatggagatttgaagtgggatattttccaagtaatgatatcaaggtcaaccacaccagatctgataaaaataggaatgaagctccaggaatttttcacacaacaatttgataccagcaaacgagctctgtctacctggggaccagttccttaccttccgccaaagacaatgactagcaacctagaaaaaagttcacaagaacaattacttgatgcagcacatcatcgacactggcctggagtattgaaggtggtatcaggatgccacatatccttatttcagattccattaccagaagatggaatgcaatttggaggatcaatgagcttacatggaaatcatatgacactggcatgttttcatggtccaaattttcgttcaaaatcttgggccctttttcatttagaagaaccaaatattgctttttggactgaagctcagaaaatctgggaagatggctccagtgatcattctacatatattgtacaaacactagattttcacctgggtcataatactatggttaccaaaccatgtggtgctttggaaagtcctatggcaacaataaccaagataacaaggcgtcgccatgaaaatccaccccatggagtagcaagtgtgaaagaatggttcaattatgttacagctacaaggaatgaagagctaaatctgcttcgtaatgttgatgctaacaacactgagaatagcactactgtgaagaattctagtttgttgagtggattcagaggaggttctagctacaaccatgaaacagagactatctttgcattaccaaggatgcagcttgactttaaatccattcatgttcaagaaccacaggagccttcattacaggatgccagcctgaagccaaaagtagaatgtagtgtggtgacagagttcactgaccacatttgtgtgactatggatgctgagctcatcatgtttcttcatgatttagtatcagcttatcttaaagaaaaagaaaaagccatctttccacctcggattttatctactcgaccaggacaaaaaagtccaattattatacatgacgacaattcctctgataaagatagagaagatagcatcacttatactactgtggactggagagattttatgtgcaatacatggcatctagaacctactcttagattaatttcttggactggaagaaagattgatccagtaggtgttgattatattcttcaaaaattgggctttcatcatgctaggactactattcctaaatggcttcaaagaggagtcatggatccactggacaaggttctgtcagttcttatcaaaaagctcggtactgcactacaggatgaaaaggaaaagaaaggcaaagacaaagaagaacactaaaaaagtaatttgatctgtgaacaaattatgattgtgtctgttttattacactggagtgtttttttagtataataatttgaaatataactttaaaataattctaaatttgtggctataattaaaagtttgtaagttaaaaaaaaaaaaaaaaaaaaaaaaaaaaaaaaaaaa

SEQ ID NO: 1772 - DNA, 1345 bp, Homo sapien
ggcgtaaaccactgcacgcagcctaccctctgcctttttaagatgatgtatttatttaatttttgccatcattggtgcttcaccttcctgcgaaggaaattccagagcctgtatttaagctacctaggcttttacactccctttattgcctttccaaatagtatctcatttggtgtactctagtgtcctatacctcttggaaacgaaagagggcccaacctacaactaagaagggacaaaccttgaactaagtaagaccttacacacccagaaagaacactgggccctccttcttcagggacaatgcagtagccacttggcttgtggaatttactgaaggctatttcctgtaacttgctagttaacttagttttgtatttcaggcagaggtgcgctctgtaatgttgggcctttgacttcacagtactggagagctgttcacacagatgtttagacctttctctctctctctcttttcttctttctcaacaactctttcacagaggcagtcattttgaaaggttgaaatatttggcctttaccaaagagctttttttttccttaagcaaaatcctttcagaaagaaacaaatggggaagggcagattaagaatgcatatgtcccaatccacttctataggagtttaatcatattcacatgagtaaaatgatggaagaactctttaaggtaatcctttgggataaaggatcctgggaagttctctcaggtaaagaaagcttacagcagatttgtaatatatgtctggagagctatttataagaaatttaagaggattgttttgttttcctttattaaagatttaagcctttttactttgcaaaaagaaaactacaaaagttttatagatataactttgctaattttttaaacttttctgaaacgattagctgtagccaaattatgtggttacgttttgctacattagaatttgaaaatgcaatatgtgtggtaaatctactgtttgaaatttataatggtctctgatatgattcgaattttggtaacttttgaaagttattttccccctttagtcatggatttctatttgttttttaatgttaatttttctagaaagcatctgaattgactaggcttttcctatataaaaaactcaaaacttgttaactctgtactttaataaaatttaaaattaaaactgtgttgtttttttctcttctgctagatacatatataattaaagtactcaagttagttgttttgcagagatgttgccttcagatgttaatcaggtctctcaagtttcatggagtctatgctgatcctttaattgacaaataaaagatatatatctgtggtgtgcaac

SEQ ID NO: 1773 - protein, 60 aa, Homo sapien
GVNHCTQPTLCLFKMMYLFNFCHHWCFTFLRRKFQSLYLSYLGFYTPFIAFPNSISFGVL

SEQ ID NO: 1774 - DNA, 4057 bp, Homo sapien
gccaataaagcaaacacttccggtgactttgagaaagatgatgatgcctataagactgaggacagcgatgacatccattttgaaccagtagttcaaatgcctgaaaaagtagaacttgtaacaggagaagaaggtgaaaaagttctgtattcacagggggtaaaactatttagatttgatgctgaggtaaggcagtggaaagaaaggggcttggggaacttaaaaattctcaaaaacgaggtcaatggcaaactaagaatgctgatgcgaagagaacaagtactaaaagtgtgtgctaatcattggataacgactacaatgaacctgaagcccctctctggatcagatagagcatggatgtggtcagccagtgatttctctgatggtgatgccaaactagagcggttggcagcaaaatttaaaacaccagagctggctgaagaattcaagcagaaatttgaggaatgccagcggcttctgttagacataccacttcaaactccccataaacttgtagatactggcagagctgccaagttaatacagagagctgaagaaatgaagagtggactgaaagatttcaaaacatttttgacaaatgatcaaacaaaagtcactgaggaagaaaataagggttcaggtacaggtgtggccggtgcctcagacacaacaataaaacccaatgctgaaaacactgggcccacattagaatgggataactatgacttaagggaagatgctttggatgatagtgtcagtagtagctcagtacatgcttctccattggcaagtagccctgtgagaaaaaatcttttccgctttgatgagtcaacaacaggatctaacttcagttttaaatctgctttgagtctatctaagtctcctgccaagttgaatcagagtgggacttcagttggcactgatgaagaatctgttgttactcaagaagaagagagagatggacagtactttgaacctgttgttcctttacctgatctagttgaagtatccagtggtgaggaaaatgaacaagttgtttttagtcacagggcagaaatctacagatatgataaagatgttggtcaatggaaagaaaggggcattggtgatataaagattttacagaattatgataataagcaagttcgtatagtgatgagaagggaccaagtattaaaactttgtgccaatcacagaataactccagacatgagtttgcaaaatatgaaagggacagaaagagtatgggtgtggactgcatgtgattttgcagatggagaaagaaaagtagagcatttagctgttcgttttaaactacaggatgttgcagactcgtttaagaaaatttttgatgaagcaaaaacagcccaggaaaaagattctttgataacacctcatgtttctcggtcaagcactcccagagagtcaccatgtggcaaaattgctgtagctgtattagaagaaatcacaagagagaggacagatgttattcagggtgatgatgtagcagatgcagcttcagaagttgaagtgtctagcacatctgaaacaacaacaaaagcagtggtttctcctccaaagtttgtatttggttcagagtctgttaaaagaatttttagtagtgaaaaatcaaaaccatttgcatttggcaacagttctgccactgggtctttgtttggatttagttttaatgcacctttgaaaagtaacaatagtgaaactagttcagtagcccagagtggatctgaaagcaaagtggaacctaaaaaatgtgaactgtcaaagaactctgatatcgaacagtcttcagatagcaaagtcaaaaatctctctgcttcctttccaacggaagaatcttcaatcaactacacatttaaaacaccagaaaaggagcctccattatggcatgctgaatttaccaaagaagaattggttcagaagctccgttccaccacaaaaagtgcagatcacttaaacggcctgcttcgggaaatagaggcaaccaatgcagtccttatggagcaaattaagcttctcaaaagtgaaataagaagattggaaaggaatcaagagcgagagaagtctgcagctaacctggaatacttgaagaacgtcttgctgcagttcattttcttgaagccaggtagtgaaagagagagacttcttcctgttataaatacgatgttgcagctcagccctgaagaaaagggaaaacttgctgcggttgctcaagatgaggaagaaaatccttcccgttcttctggatgagcatcctatcttcgtagttggtttggacttcgataggttgatggaaggaatacttctattaaccaaatagaatctgtttacaaaaatggttcgtgtgtgttaccattattcttttgtcaaaaagtgtgtatatgtgtttgcatttacatatatttgtacatctgtatgacagatgtattttaaaagtttcaacttgaagtaaaagtacaacagcttgaagtgttgataccaggccacagccctctaactcatgtgatctcccatgcatgctgccagaataaaaccaccaggaatgaattcactccccacttctctggaacctcaggacccgcccatttctcggcagtactgtgaattttgaagttaaactaaattttggtaccataccaactggaatttaggctttaaaaataatgtttcaaggccaggtgtggtgattcatgcctgaaatcccactactttgggaggctgaggctggagaatcgcttgaggctagtgagctgtgattgtaccactgcactccagctcggggaacagagcgagaccttgtctctaaaaataataatagtaataaaaataacgttttatgactatttattgcaaggtcagatttacagattgttataaattgttgagaaatttttgtgattagaatatgaaggaaaaagctttgttggtaaaagtgacatgttaaggggctatgaagtaaatatgctgcagttaattgtgctaagttaaaatacagtttagttatttgctttaaaataaactcttctttttttctttaaagtatactacctcaaaactcattatgttgtcagagccctagagctggctagtgtaacactgactatgagtaggtgggcccaccacttgagttgaggtgatttcatggtgtctttccaggctcttgatagggtgtcactgcatgcaagccatgaatctgttttgagaatcctctccattttcccaaataaaaacctatcccaacagtgactatatcactcagcattggatctaaatataaaagtggtgctttcagtgtttttggcagatagtgttccataacctttccatcagaagggattttagacaccttagaggtccgtgctacatcttcacagttcctccgaataaccttaggtggtagtgttacttgcctttgacacctgtgcatatgttttaatgactagatccaaactgtgttgttcttaaatcaaaaattggataatttttaatatttatgtattaatcacacagtgtgctctctgaagttctcttaagccttcagtttatactcttaattttctttctgagctggggaactgactttgcactttggttacacagaacattggtttccaatttagtttaactgaaatttgctgctgatatgttgagtttgttctttaaaaaatatctcatatatctcgtctttcctccttagaagaacagacctaactagcgaatgtatgaatgaaaatgcatctatttcagagccgacatgaagagtttagtttttttactttataaactgtgaatatgagtatgccagctgcattagatgtaactaatcatatttaaatatatttcactttgactttagaccttttgaagtctgtataaacttgttttgaaatacagtctccacttacgaatgtcataacaaaatacttttttgcatgataaaaaattactttgattacaaaaggcatattctttcatggtttctgcaatgagaggaagtgtaatgattattttaatatttctattaaaactgtatattttt

SEQ ID NO: 1775 - DNA, 2711 bp, Homo sapien
gggagagggagctctcgggtcggggctagggaaggctgaaccccgctcggcccgggtgaaagggcggtgacggcactgggtggggccgagctccagggctggctgctgggctgctaagggaactgtgagccgctcagagccgcgcgcctcccgggcggggcggggccggccgtgggagtccgcgcgtgcccgcgccgagctgcctgctccggcggcttcgctgctagctcgcggcgacgtcgggccgattttcccaggatgacagagctgaggcagagggtggcccatgagccggttgcgccacccgaggacaaggagtcagagtcagaagcaaaggtagatggagagactgcatcggacagtgagagccgggcagaatccgcacccctgccagtctctgcagatgataccccggaggtcctcaatagggccctttccaacttgtcttcaagatggaagaactggtgggtgagaggcatcctgactttggccatgattgcatttttcttcatcatcatttacctgggaccaatggttttgatgataatcgtgatgtgcgttcagattaagtgtttccatgagataatcactattggctacaacgtctaccactcatatgatctgccctggttcaggacgctcagctggtactttctcctgtgtgtaaactatttcttctatggtgagacagtgacggattacttcttcaccctggtccagagagaagagcctttgcggattctcagtaaataccaccggttcatttcctttactctctatctaataggattctgcatgtttgtactgagtctggtcaagaagcattatcgactgcagttctacatgtttggctggacccatgtgacattgctgattgttgtaacacagtcacatcttgttatccacaacctatttgaaggaatgatctggttcattgtccccatatcttgtgtgatctgtaatgacatcatggcctatatgtttggctttttctttggtcggaccccactcatcaagctgtccccgaagaagacctgggaaggcttcattgggggcttctttgctactgtggtgtttggccttctgctgtcctatgtgatgtccgggtacagatgctttgtctgccctgtggagtacaacaatgacaccaacagcttcactgtggactgtgagccctcggacctgtttcgcctgcaggagtacaacattcctggggtgatccagtcagtcattggctggaaaacggtccggatgtaccccttccagattcacagcatcgctctctccacctttgcctcgctcattggcccctttggaggattcttcgcaagtggattcaaacgagcctttaaaatcaaagactttgccaataccattcctggccatggaggcatcatggatcgctttgactgccagtatctgatggccacctttgtcaatgtatacatcgccagttttatcagaggccctaacccaagcaaactgattcagcagttcctgactttacggccagatcagcagctccacatcttcaacacgctgcggtctcatctgatcgacaaagggatgctgacatccaccacagaggacgagtaggggccacccagggtcaggagaacaggaacagaactgagcaggggcaggtctccaaggcaagcccagctggtgtgacttagacaatgacgaggcttcaactcactgtctttttttttttttttggagggtattttttatttgtgggttcaaaaaatctgtatatacagtctatgtgtttagaatttgtgttgtaagtaaactacagctttgagttggaaagaagtcacgggttgtaaaaccatttggatttttttaaaacaaaagtattaataatctggaagacagtgttgcccaggtcaggagtgttttcttggtggttccagcccccatcaattgaactgtttctgggctcagtcagacacagacattcatctgtgtctgaccaaatcaggggacttccccacctgtggtgaggcacagcttagatgttttgtacacctggtcttttctagaaatccctgcttggagctgcagaagggttgccttctgtaggtcggaggaatggaggcttactaaccaggtaagccttctatgcatccacaccaaaatcctgcagaatgtaagtaagctctgctttataagatgggttcaccttcatcgcagactgaaaatttcagtttttatttttttcagaaagcacgaaaaattatttataatagtctggagaaaaaacacactgtaatatttcaagtgtatgcagtagaatgtactgtaactgagccctttcccacatgtctaggctccaatgtctcctgtaggtccacctaactgtgtgttttcagggacaatgccatccatgtttgtgctgtagacttgctgctgctgaatcctttctggggactttctcatcgggcagggagcagagggcttctcgttcatgcaccctttgcctgaacacccatgtagctgctgtgttgtgtatatattactcttaagaggagtgtgtgtgtctgtgtttgttttaaaagtcacttatttcttacagtgatttcaattgcaccatgacttcttcactaaaaccacaaagtcctgcttaaaactatggaaaacctaacctgattagagccttgactattttgaagattaaatgcacactttttatataaaaaaaaacg

SEQ ID NO: 1776 - protein, 445 aa, Homo sapien
MTELRQRVAHEPVAPPEDKESESEAKVDGETASDSESRAESAPLPVSADDTPEVLNRALSNLSSRWKNWWVRGILTLAMIAFFFIIIYLGPMVLMIIVMCVQIKCFHEIITIGYNVYHSYDLPWFRTLSWYFLLCVNYFFYGETVTDYFFTLVQREEPLRILSKYHRFISFTLYLIGFCMFVLSLVKKHYRLQFYMFGWTHVTLLIVVTQSHLVIHNLFEGMIWFIVPISCVICNDIMAYMFGFFFGRTPLIKLSPKKTWEGFIGGFFATVVFGLLLSYVMSGYRCFVCPVEYNNDTNSFTVDCEPSDLFRLQEYNIPGVIQSVIGWKTVRMYPFQIHSIALSTFASLIGPFGGFFASGFKRAFKIKDFANTIPGHGGIMDRFDCQYLMATFVNVYIASFIRGPNPSKLIQQFLTLRPDQQLHIFNTLRSHLIDKGMLTSTTEDE

SEQ ID NO: 1777 - DNA, 4121 bp, Homo sapien
acaatgtggtcccgaagcggccagcgccgggagctgcagcgctgagacccccagcccgccccctcgggctcccggccggggccccatcatgttctccaggaagaaacgagagctcatgaaaaccccttccatctcgaaaaagaaccgcgcgggaagccccagcccgcagccctcgggggagctgcccaggaaggatggggctgacgcggtgttccccggaccaagcctggagccgcccgctgggtcctccggcgtcaaggccacagggaccctcaagcggcccaccagcctgagccgccacgccagcgcggctggcttccccctgtcgggtgctgcctcctggacactgggccggagccaccggagcccactgacagccgccagcccgggcgagctgcccaccgagggtgccggcccggacgtcgtcgaggacatctcccatctgctggcggacgtggcccgcttcgctgagggccttgagaaacttaaggagtgtgtgttgcgtgacgacctccttgaggcccgccgcccgcgggcccacgagtgcctgggtgaggctctgcgtgtcatgcatcagatcatctccaagtacccgctgctgaacaccgtggagacgctcaccgcagccggcaccctcattgccaaggtcaaagccttccattatgagagcaacaatgatctggagaaacaggagttcgagaaggccctggagacgattgctgtggccttcagtagcacagtgtccgagttcctcatgggtgaagtggacagcagcaccctcctagcagtgcctcctggggactcgagccagtccatggaaagcctgtatggaccgggcagtgagggcacgcctcccagcctggaagactgtgacgccggctgcctgcccgccgaggaggtggacgtgctgctacagcgctgtgaggggggcgtggatgccgcactgctgtatgccaagaacatggccaagtacatgaaggacctcatcagctacctggagaagcggacgacgctggagatggagtttgccaagggcctgcagaagatcgctcacaactgcagacagagcgtcatgcaggagccccacatgccgctcctgtccatctactcgctggccctggagcaggacctggagttcggccacagcatggtgcaggcggtgggcaccttgcagacccagaccttcatgcagcccctgaccctgcggcggcttgaacacgagaagcgcaggaaggagatcaaggaggcctggcaccgtgcccagaggaagctgcaagaggcggagtccaacctgcgcaaggccaagcagggttacgtgcagcgctgcgaggaccacgacaaggctcgcttcctcgtggccaaggcggaggaggagcaggctggcagcgcgccgggagcaggcagcacggccaccaagaccctggacaagcggcggcggctggaggaggaggccaagaacaaggcggaggaagctatggccacctaccgcacctgcgtggccgacgcgaagacgcagaagcaggagctggaggataccaaggtgacggcgctgcggcagatccaggaggtcatccggcagagcgaccaaaccatcaagtcggccacgatctcctactaccagatgatgcatatgcagacggcgccgctgcccgtgcacttccagatgctgtgtgagagcagcaagctgtatgacccaggccagcagtacgcctcccacgtgcgccagctgcagcgggaccaggagcccgatgtgcactacgactttgagccccacgtctccgccaacgcctggtcccccgtcatgcgtgcccggaagagcagcttcaacgtgagtgatgtggcgcggccggaggctgccgggagccccccagaagaaggcgggtgcactgagggcacacctgccaaggaccacagggccgggcgaggacaccaggttcacaagtcatggccgctctcgatctcagactcggacagtgggctggaccccggccctggcgcaggggactttaagaagttcgagcggacgtcatccagtggtaccatgtcgtccacggaggagctggtggacccagacggtggagccggggcttcagcctttgagcaggctgacctcaacggcatgacccccgagctgccggtggccgtgcccagtggaccgttccgccacgaggggctgtccaaggcggcccgtactcaccggctccggaagctccgcacgcccgccaagtgccgcgagtgcaacagctacgtctacttccagggtgctgagtgtgaagagtgctgcctggcctgccacaagaaatgtctggagacgctggccatacagtgcgggcacaagaagctgcaaggccgcctgcagctgttcggccaggacttcagccacgcggcccgcagcgcccccgacggcgtgcccttcatcgtcaagaagtgcgtctgcgagatcgagcggcgggcgctgcgcaccaagggcatctaccgggtcaatggggtaaagacacgcgtggagaagctgtgccaggccttcgagaacggcaaggagctggtcgagctgtcgcaggcctcgccccacgacatcagcaacgtcctcaagctctacctgcgtcagcttcccgagccgctcatctccttccgcctctaccacgagctcgtagggctggccaaggacagcctgaaggcagaggccgaggccaaggcggcgtcccggggccggcaggacggctcggagagcgaggcagtggcggtggccctggcaggtcggctgcgggagctcctgcgggacctgccgcctgagaaccgggcctcgctgcagtacctgctgcgtcacctacgcaggatcgtggaggtggagcaggacaacaagatgacccccgggaacctgggcatcgtgttcgggcccacgctgcttcggccacggcccaccgaggccaccgtgtccctctcctccctggtggattatccccatcaggcccgcgtcatcgagactctcatcgtccactacggcctggtcttcgaggaggagccggaggagacccccgggggccaggacgagtcatccaaccagcgagctgaggtagtcgtccaggtgccgtacctggaggcgggcgaggcggtggtctacccgctgcaggaggcggcggcggacgggtgcagagaatcccgagttgtgtccaacgattcggactcggacctagaggaggcctccgagctgctgtcctcatcggaggccagtgccctgggccacctcagcttcctggagcagcagcagagcgaggccagcctagaggtggcttctggcagccacagcggcagtgaggagcagctggaggccacagcccgggaggacggggacggggacgaggacggcccggcccagcagctctcaggattcaacaccaaccagtccaacaacgtgctgcaggccccactgccccccatgaggctccgtggcgggcggatgacactgggctcctgcagggaaaggcagccggaattcgtgtgagctggggtggggctgggaccacaggtggcttctctcttgcctgctcctgtccctccagcacgtcccctgcaccacggcatagcttaggtgcgccgtcctggggtcgctgccgagagcgcctggacttcgacgtcccaccagcgggcgcctcctcccagaggcttccaggagcacgagggccttgcggcacaggactgtgccctgtgctgtcccctgcaccccggctcagctgagctggggaacactgctgtcgtgtgaagtcacagtggccttgttggtgcccacagggctgtgtggatggaggaagctgtccctgcccagtgcatcccccaggtcatcacggggacgcaggaggcaggccctgccctgccctctcctcacaggtctgttgcagggactccagaaaccattctgggagccgtggatgggggcggagctggggtttggtgcagtttccagggtgcagtacagcagggcctgaatactggccctggactcccttttccagaacaccaggtgtggccacctggggctcaggtacacagtggggtctctcggaagccaccgtgtggttctttcacaggcacgtttattttgctgaaataaaaagtttttaatcggg

SEQ ID NO: 1778 - protein, 1165 aa, Homo sapien
QCGPEAASAGSCSAETPSPPPRAPGRGPIMFSRKKRELMKTPSISKKNRAGSPSPQPSGELPRKDGADAVFPGPSLEPPAGSSGVKATGTLKRPTSLSRHASAAGFPLSGAASWTLGRSHRSPLTAASPGELPTEGAGPDVVEDISHLLADVARFAEGLEKLKECVLRDDLLEARRPRAHECLGEALRVMHQIISKYPLLNTVETLTAAGTLIAKVKAFHYESNNDLEKQEFEKALETIAVAFSSTVSEFLMGEVDSSTLLAVPPGDSSQSMESLYGPGSEGTPPSLEDCDAGCLPAEEVDVLLQRCEGGVDAALLYAKNMAKYMKDLISYLEKRTTLEMEFAKGLQKIAHNCRQSVMQEPHMPLLSIYSLALEQDLEFGHSMVQAVGTLQTQTFMQPLTLRRLEHEKRRKEIKEAWHRAQRKLQEAESNLRKAKQGYVQRCEDHDKARFLVAKAEEEQAGSAPGAGSTATKTLDKRRRLEEEAKNKAEEAMATYRTCVADAKTQKQELEDTKVTALRQIQEVIRQSDQTIKSATISYYQMMHMQTAPLPVHFQMLCESSKLYDPGQQYASHVRQLQRDQEPDVHYDFEPHVSANAWSPVMRARKSSFNVSDVARPEAAGSPPEEGGCTEGTPAKDHRAGRGHQVHKSWPLSISDSDSGLDPGPGAGDFKKFERTSSSGTMSSTEELVDPDGGAGASAFEQADLNGMTPELPVAVPSGPFRHEGLSKAARTHRLRKLRTPAKCRECNSYVYFQGAECEECCLACHKKCLETLAIQCGHKKLQGRLQLFGQDFSHAARSAPDGVPFIVKKCVCEIERRALRTKGIYRVNGVKTRVEKLCQAFENGKELVELSQASPHDISNVLKLYLRQLPEPLISFRLYHELVGLAKDSLKAEAEAKAASRGRQDGSESEAVAVALAGRLRELLRDLPPENRASLQYLLRHLRRIVEVEQDNKMTPGNLGIVFGPTLLRPRPTEATVSLSSLVDYPHQARVIETLIVHYGLVFEEEPEETPGGQDESSNQRAEVVVQVPYLEAGEAVVYPLQEAAADGCRESRVVSNDSDSDLEEASELLSSSEASALGHLSFLEQQQSEASLEVASGSHSGSEEQLEATAREDGDGDEDGPAQQLSGFNTNQSNNVLQAPLPPMRLRGGRMTLGSCRERQPEFV

SEQ ID NO: 1779 - DNA, 1843 bp, Homo sapien
ggcacgagcaagacatcaactgaatgaggattttaaaaaatggtatataagcataggacaagggctatgtttgtttgtttttcaaaagtgctttgaagataacagcctttaggtttgagttatttcacttttcataatttttaagtagcttatatataatggtggtaccataggattttcttttttcaaatgactgtcggcagaaacagtgggcactgactcaccttttgagttttagcagagaattatttatttctttacaatgcactttctaacccattgtagctatattagcattatcttttaaaaaagacatgcttttgtatttaaatattgtaggatttaagtgtctttctcaaaatagcttattcctttctgaaagaaaatgagggaaatactctgaattattaggagacttaaacccaatatttaaatatgctattttataacactgcatcagttttaggagttgcatctctcctgctggctcttttatatttgagcaagatcagtgtagaatatgtgtttagaaacttgtctgttgtctcagtttagtgaaaaggaggtgctgcatgtgcctgaattaaaaccaagaaatttttccaagccaaatgcagccttagtgatgagagatttaattctccattgtcaccttttagcttttatgattgcttagttttttctgaaggatgtctgcattgtaaaactatggactaaaacctaaaaaacagaatcctcaaaaactttgctgtatgtgttttaacattttagagaacagtatgttgaataactaaggtatgtaacttgaataggaaaaatgtccatcaaatgcaccttggaaaatcacagtaggtagaaggctgtgttaaccgtttgtgtcttattaacatccttaagttaattttgaatttttgacagttttgagggaaaagacctatggaacctaatgtgaagtatttcgtatgttaactggtgttgagttgaagatttttactgtgtataagcagatatcatttgaatgataaaaatgtcattaacctgctgtcttaagatgttcacacaaatatggagagtaattctacaatataaaaatatttattttaatactgagtttcagttaagtcataaacagtgttaaaactcttgggaaggtgtaggggttttttgtttgtcatttttaaaattgaaactgtgtcatacagtgtttcacgtctctgaaattgggattataatagcactattttgatgtagctctaccgatactatgtggtaatgctattttgttttactaacaagctctggaatatttagcagtcattttcactggcacaagagccttttgtatgttattcaatttaaacttttaaaccaaaaattttatggtccagtgtctttggcaaaaagatgctggagggaatgtaacatacaattaatatgtggttatatatatatataaaaagacacaaattgccatgttatggttctgccttgaaacagcacaatgaagtgtatcagtatattctgtgattatgaaacttatatgttgtgttgttttgtgtcttctgttgcctgtcctttgggccagatgtgggccagttaaatgcagttatcatctcattaaatacagatgcagataaaatatctttagtgctgcaacattttacctaactttttgtatgttttcatgactgtgtgttattttccaaagctgttcctacctcaccatgaggctttatggattgttatgtattataaatgttctatatgagacagactactgtgtttcttctcatttattaaaagttaagtagaaaaataaactaattttaatatctaaaaaaaa

SEQ ID NO: 1780 - DNA, 979 bp, Homo sapien
cagtgtgcaagcgatgtgtgcataagccacggacaccgagtatgccgtgaagatcattgataagagcaagagagacccctcggaagagattgagatcctcctgcggtacggccagcacccgaacatcatcaccctcaaggatgtctatgatgatggcaagtttgtgtacctggtaatggagctgatgcgtggtggggagctcctggaccgcatcctccggcagagatacttctcggagcgcgaagccagtgacgtcctgtgcaccatcaccaagaccatggactacctccattcccatgtgggagaaatacctgattctcccaatctgcagtgggagagctttgctgaattccatcccaaagtcaaacatgggcaagaggtgaggatttcacttttaccctcaagtccgatttgtctgtgattttaaactaactgtgtatgtattgatgtttggaagattgtttgaattttaaagtgataatagtacttaatgttatccagtattgttcattaaatggtgttatcctaaagctgcacttgggatttttacctaacgctttactgattctctcaagcacatggcaaagtttgatttgcactccgttcatttctgacacgttttgctgcctcctacctttctaagcgtcatgcaaattcgagaatggagaaggactctgccggtccctgagcggtgtggagagggcggaaggtggactccagcgcagcttgaggggctgaggacggaggctgcagcatctgtgtcgttctactgagcacgcttctctgcctcgctcctgactcagcactttgttcactggcttagcagttatgtttacacatcatttttatgttcctgctttgtaattcatgtttgagatgggtggccactgtacagatatttattacgctttccagactttctgaatagatttttttgaataaacatggttttatgaagtgtaatctttttctagcctaa

SEQ ID NO: 1781 - protein, 81 aa, Homo sapien
MELMRGGELLDRILRQRYFSEREASDVLCTITKTMDYLHSHVGEIPDSPNLQWESFAEFHPKVKHGQEVRISLLPSSPICL

SEQ ID NO: 1782 - DNA, 5688 bp, Homo sapien
taggatacaacatagaacctattatgctctatcaggatatgacagcgcgtgatctgctacagcagagatacacccttccaaatggagacactgcctggcggtcctcaccccttgtgaatgctgctctggaaggcaagctggtcctgctggatggcattcaccgggtgaatgcgggcacgcttgctgtattgcaaaggttaatccatgatcgagagctaagcctctatgatggttctaggctgctgagagaagacaggtatatgcgtttaaaggaggagctgcaactgtctgatgaacagctacagaagagatccatttttcctatccatccctccttcagaatcattgccttggcagaaccccctgttattggaagcacagcacaccagtggctgggaccagaattcttaaccatgttctttttccattacatgaaaccacttgtgaaaagtgaagaaatccaagtgattaaggaaaaggtcccaaatgtacctcaggaagctctggataagttattatcatttacacacaaactcagagaaacacaggatccaacggcacaatcattagcggcatcactttctaccagacaactgttgcgaatttctcgtcggctgtcacagtatcctaatgaaaatcttcacagtgctgttactaaagcctgcctttccaggtttttacccagtcttgctaggtcagcattagaaaaaaatctggcagatgctacaatagaaataaatactgatgacaatttggagccagaactgaaggattacaaatgtgaagtaacatctggaactctgaggattggtgctgttagtgcaccgatctataatgcacatgagaaaatgaaagtgcctgatgttcttttctatgacaacattcagcatgtgatagtgatggaagatatgctgaaagactttctccttggagaacacttattattggttggcaaccagggtgtaggaaaaaacaagattgttgacagattccttcacctgctcaacagaccccgagaatatattcagctacacagggataccacagtacaaactcttacgcttcagccttcggttaaagacggacttattgtatatgaagactcacctttggttaaagcagtaaagttgggtcatattctggtagtagatgaggctgacaaagctccaacaaatgtcacgtgtattttaaaaactctagtagaaaatggagaaatgattctagcagatggaagacgcattgttgcaaattctgctaatgtgaatggaagagaaaatgttgtagtgattcatcctgattttaggatgattgttctggcaaatagacctggatttcctttcctaggcaatgatttcttcggtaccttaggtgatatttttagctgccatgcagttgataaccccaaaccccactcggagctcgagatgctcagacagtatggaccaaatgtgcctgagcccatccttcagaagcttgtggctgcctttggagagctgaggagtttggctgaccaagggattattaactatccttattctaccagagaagttgtcaacatagtcaaacatttacagaaatttccgactgaaggtctctccagtgtagttcgaaatgtgtttgactttgattcctacaacaatgacatgagggagatattgattaacactttacacaaatacgggatacctatcggagcaaagcctaccagtgtgcagctggcaaaggagttgactctgccagaacaaacgttcatgggctactggacaattggtcaggcaagaagtgggatgcaaaaactcttgtgtccagtggaaactcatcatatagacataaagggtccagcacttataaatatacaggagtatccaatagaaagacatgaagaaagatccctaaactttactgaagaatgtgcctcatggagaataccattggatgaaattaatataatctgtgacattgctacatcacatgaaaatgagcaaaatactctctatgtagttacatgcaatcccgcttccctgtactttatgaatatgactgggaaaagtggcttctttgtggacttttttgatatcttcccaagaacagccaatggcgtttggcacccttttgtgacagtggcaccgctgggaagtcctctcaaaggtcaagtggttctccatgagcagcagagtaatgttatcctgttgttagatactactggccgggcccttcatcgtctcatcctcccttccgagaagtttacatctaagaaacctttctggtggaacaaagaagaagctgaaacttataaaatgtgtaaagaattttcacacaaaaactggctggtgttctacaaagaaaaagggaacagcctgactgtgctggatgttctagaagggcgaactcacaccatctcacttcccatcaacctcaagacagttttccttgtagcagaggacaaatggcttctggtggagagcaaaacaaatcagaaatatcttttaactaagcctgcacacatcgaatctgagggtagtggggtttgccagttgtatgtgctgaaagaggagccgcccagcacagggtttggagttacacaagaaacagagttcagcatacctcataaaatttccagtgatcaactatcatctgaacatctaagttcagctgtggaacaaaagattgcctctcccaacagaattctctcagatgagaaaaattatgctacaatagttgttggttttccagatctcatgtcacccagtgaagtttattcttggaagagaccatcatctttgcataaacgaagtggcactgatacatcattctatagaggaaagaagaaaagggggactccaaaacaaagcaattgtgtgactcttttagatacgaatcaggtagtgaggattttacccccaggagaagtccctctaaaagatatctacccaaaagatgttactcctccacaaacatctggttatatagaagtcactgatcttcaatcaaagaaactccgatatatccctattcccagatcagaatctctctcgccgtataccacatggctgtcgaccatttcagacacagatgcactgctggctgagtgggacaaaagcggtgttgttactgttgatatgggaggtcacatcaggctttgggaaactggacttgaacgtctgcagcgatcactcatggaatggagaaacatgattggacaagatgacagaaatatgcagataacaatcaacagagacagtggtgaagatgtaagctcccccaaacacgggaaggaggacccagacaacatgcctcacgtgggcggcaacacttgggctggcggaacagggggaagagacacggcaggcctgggtggcaaaggaggcccttaccggctggatgcaggccatacggtgtaccaggtctctcaggctgagaaagatgcagttcccgaagaggtcaagagagctgctagagagatgggccagagagcattccagcagaggctaaaggagatccaaatgagtgaatacgatgctgcaacctatgaaaggttttcaggtgctgttcggcgacaggtgcactccctccgaatcatcctggataatttacaggctaaaggtaaagaaagacaatggctaagacatcaagctactggagaattagatgatgccaagatcattgatgggctgactggagaaaaagccatctacaaacgtcggggtgagctggagccacaacttggcagcccacaacagaaacccaagcgtctgcgcctggtggtagatgtgtctggtagcatgtaccgtttcaacaggatggatggccggcttgagcgcacaatggaggctgtgtgtatggtcatggaagccttcgagaactatgaggagaagttccagtatgacatcgttggacactctggagatggctacaacattggtctggttccaatgaacaaaatccccaaggacaataagcaaagactagaaattctgaagacaatgcatgcccactctcagttctgcatgagtggggaccacacgttagaagggacagaacatgccatcaaggaaattgtcaaagaagaagctgatgagtactttgtcatagtcttgagtgatgcaaatctgtcacgatatggaatacatcctgctaagtttgctcaaatcctcacaagagaccctcaagtaaatgcttttgccatttttattggctctttaggtgatcaagcaaccaggcttcagagaactttaccagctggtcggtctttcgttgccatggataccaaggatatccctcagattttacaacagatcttcacctccaccatgttgtcgagtgtctaagaagtgcccttcatcaccctgatgacaccaggatttgaaataagacaggaataaagagtattctgaaaaaaagaagatatggatgaagtgaacccatgcagtgactggatgattccggcattcctgggtcttcctacacttgctccgtaatgagaattcagagaagcagccagaaggagacttaaacatggaaagatactccactgatgagtttagaagtgattagggcaagctagttgacctgcactttatcaaaggttggggttaaaggaaggtggttttgagaactatgtgtttggtctatttccaaaaacctgagggggagaaaatactttgcttttgccttaacacatcatctggtcacgttagaaaagtgaccccatcaaactgagcctttgatgtcacattctgacacaagatgcaagtctgtgcaaaacccaccaaaatgctcctatccaacaattatttttattttctccctgctctgtattgaccagaaaacaatgattttataatatttaacccaccaaaaagtccctccaacagcaatatcttatgaaaggctggctgttctcaataatttcattttcttggccaaagccaaaaggaatcaaaaaatccttggagtgcttgcctttccacgtgacttttaaaaggctcttaaagagcaaatgtcctcttctccttgctgctagagtgggaggagaaagatgtcttgccttaaaagtttactgtttcttctgttcttctagcatctctcaaaaaattcacagtactccattttggggtccaaactgtaatgctcaaaataataaatgcttacacgaaaattatttattgagaatattcatataaaaattacctaaagcaaagtaaaaaaagtaaaatcaaggtggtatatttgaagtgaatggtgattggaaatttttagctgtaacaaaaagaaagaaaacaactttttttaaagcctcattctcttttctttcaaaatgtaccttattcccacacactcttgggctgacctttattttatcaataagctcaatattactttgtttaaaataagatgcttcagcaaaagtcattctctctttaaccatataatttaaaaactcctcttcacgattgatagcaaaatcagaaacgttagggcaccagtgagttgaaaaaactggtcttaagttggaaaaactattattaataatattatcctatccatccatatctattgaaattgtacaggtccataatttcattttaattaattataggaaagaagaaaagataatacccatttgttctatcacccctctccctatcattaactatcaaataaataaataaaagcaatctgatttcc

SEQ ID NO: 1783 - protein, 1441 aa, Homo sapien
GYNIEPIMLYQDMTARDLLQQRYTLPNGDTAWRSSPLVNAALEGKLVLLDGIHRVNAGTLAVLQRLIHDRELSLYDGSRLLREDRYMRLKEELQLSDEQLQKRSIFPIHPSFRIIALAEPPVIGSTAHQWLGPEFLTMFFFHYMKPLVKSEEIQVIKEKVPNVPQEALDKLLSFTHKLRETQDPTAQSLAASLSTRQLLRISRRLSQYPNENLHSAVTKACLSRFLPSLARSALEKNLADATIEINTDDNLEPELKDYKCEVTSGTLRIGAVSAPIYNAHEKMKVPDVLFYDNIQHVIVMEDMLKDFLLGEHLLLVGNQGVGKNKIVDRFLHLLNRPREYIQLHRDTTVQTLTLQPSVKDGLIVYEDSPLVKAVKLGHILVVDEADKAPTNVTCILKTLVENGEMILADGRRIVANSANVNGRENVVVIHPDFRMIVLANRPGFPFLGNDFFGTLGDIFSCHAVDNPKPHSELEMLRQYGPNVPEPILQKLVAAFGELRSLADQGIINYPYSTREVVNIVKHLQKFPTEGLSSVVRNVFDFDSYNNDMREILINTLHKYGIPIGAKPTSVQLAKELTLPEQTFMGYWTIGQARSGMQKLLCPVETHHIDIKGPALINIQEYPIERHEERSLNFTEECASWRIPLDEINIICDIATSHENEQNTLYVVTCNPASLYFMNMTGKSGFFVDFFDIFPRTANGVWHPFVTVAPLGSPLKGQVVLHEQQSNVILLLDTTGRALHRLILPSEKFTSKKPFWWNKEEAETYKMCKEFSHKNWLVFYKEKGNSLTVLDVLEGRTHTISLPINLKTVFLVAEDKWLLVESKTNQKYLLTKPAHIESEGSGVCQLYVLKEEPPSTGFGVTQETEFSIPHKISSDQLSSEHLSSAVEQKIASPNRILSDEKNYATIVVGFPDLMSPSEVYSWKRPSSLHKRSGTDTSFYRGKKKRGTPKQSNCVTLLDTNQVVRILPPGEVPLKDIYPKDVTPPQTSGYIEVTDLQSKKLRYIPIPRSESLSPYTTWLSTISDTDALLAEWDKSGVVTVDMGGHIRLWETGLERLQRSLMEWRNMIGQDDRNMQITINRDSGEDVSSPKHGKEDPDNMPHVGGNTWAGGTGGRDTAGLGGKGGPYRLDAGHTVYQVSQAEKDAVPEEVKRAAREMGQRAFQQRLKEIQMSEYDAATYERFSGAVRRQVHSLRIILDNLQAKGKERQWLRHQATGELDDAKIIDGLTGEKAIYKRRGELEPQLGSPQQKPKRLRLVVDVSGSMYRFNRMDGRLERTMEAVCMVMEAFENYEEKFQYDIVGHSGDGYNIGLVPMNKIPKDNKQRLEILKTMHAHSQFCMSGDHTLEGTEHAIKEIVKEEADEYFVIVLSDANLSRYGIHPAKFAQILTRDPQVNAFAIFIGSLGDQATRLQRTLPAGRSFVAMDTKDIPQILQQIFTSTMLSSV

SEQ ID NO: 1784 - DNA, 4628 bp, Homo sapien
gagcagaccccgaaagccccatcctggacctggaccttcacctgcccttgctgtgcttcaggcctgagaaggtgctacagatcctgacatgcatcctgacggaacagcggatcgtcttcttctcctcggactgggctctgctgacgctggtcactgagtgcttcatggcctacctgtatccgctgcagtggcagcaccccttcgtgcccatcctgtcggaccagatgctggatttcgtcatggcccccacgtccttcctgatgggctgccatctcgaccacttcgaagaagtcagcaaggaagccgacggtttagttctgataaatattgatcatgggagcatcacctactccaagtccacggacgataacgtggacattcctgatgtccccctcctggcagcccagacgtttattcagagggtgcagagcctccagctccaccatgagctgcacgccgcccacctcctctccagcacagacctgaaggagggccgagcccaccggcggtcctggcagcagaaactcaactgccagatacagcagaccaccctgcagctgctcgtgagcatcttcagggatgtaaagaatcatttaaactatgaacacagagtctttaatagtgaagaatttctcaaaaccagggctccaggggaccatcagttttataagcaggtcttagacacctacatgttccattcttttcttaaagcccggctcaataggaggatggacgcctttgctcagatggacctcgacacccagtcggaggaggacagaataaatggaatgcttctaagtccaaggagaccgaccgttgagaaaagagcctcccggaagtcctcgcacctgcatgtcacccacaggcgcatggtggtcagcatgcccaacctgcaggacattgccatgcctgagctggcacccaggaactcctcgctccggctgacggacaccgcaggctgtaggggcagcagcgcagttctgaatgtcacgccgaagtccccgtatacattcaagattcccgaaatccactttccgctggagagcaagtgcgtgcaggcataccatgcccactttgtctccatgctgagcgaggccatgtgctttctggcccccgataactctctgctcctggcccgctatttgtacctccgagggctcgtttatctgatgcagggacagctgctgaacgccctcttggacttccagaatctgtataaaacagacatacggatctttcccactgatttggtgaagaggacggtggaatccatgtctgcccctgagtgggagggggctgagcaggcgccggagctgatgaggctcatcagcgagatcctggacaagccgcacgaggcctcgaagctggacgaccacgtgaagaagttcaagctgcccaagaagcacatgcagctgggcgacttcatgaagcgggtccaggagtcagggatcgtgaaggacgccagcatcatacaccggctgttcgaggccttgactgtaggacaggagaaacaaatcgacccagaaacattcaaagatttctacaactgctggaaggagacggaagcagaagcccaggaggtcagtctgccgtggctggtgatggaacacctggataaaaacgagtgtgtgtgtaagttgtccagctccgtcaagacaaacctaggcgttggcaagatcgccatgacccagaagcgcctgttcctcctaaccgaaggaaggccaggctacttggagatttccaccttcagaaatatagaggaggtcaggagaaccactactacatttctacttcggagaatacccactttaaaaatcagagtggcgtccaagaaagaagtcttcgaagccaacctgaaaaccgagtgtgacctttggcacctgatggtgaaggagatgtgggctgggaagaagctggccgatgaccacaaggaccctcactacgtccagcaggcgctgaccaacgtcttgctgatggacgccgtcgtgggcacactgcagtcaccaggcgccatctacgctgcctccaagttatcctactttgataagatgagtaacgaaatgcccatgacgcttccggagacaaccctggaaacactgaagcataaaatcaacccctcggcgggggaggcgttcccacaagcggtggacgtgctgctctacactccagggcatcttgacccagccgaaaaagttgaagatgctcaccccaagttatggtgtgctctgagcgaaggcaaggtgaccgtgttcaatgcttcttcatggaccatccaccagcactcctttaaagtgggcactgcaaaagtgaactgcatggtgatggccgaccagaaccaggtgtgggttggctcggaagactccgtcatctacatcatcaacgtccacagcatgtcctgcaacaagcagctcacagcccactgctccagtgtcacggatttgattgtgcaggacggacaggaggcacccagcaacgtgtactcgtgcagcatggacggcatggtgctggtgtggaatgtgagcacactgcaggtgaccagccgcttccagctgccgcgaggtggcctgacgtccatcagactgcacggcggccgcctgtggtgctgcacaggtaacagcatcatggtcatgaaaatgaatggatccctccatcaagaattgaagattgaggagaacttcaaagacaccagtacctccttcctggccttccagctccttcctgaggaggagcagctgtgggcggcctgtgcaggacgcagcgaggtttacatctggagcctgaaggacctggcccagcccccgcagagggtgcccctcgaggactgctctgagatcaactgcatgatccgggtgaagaagcaggtctgggtgggcagccgagggctggggcagggaacacccaaggggaaaatctacgtgattgacgccgagaggaagaccgtggagaaggagctggtggcgcacatggacaccgtgaggacgctgtgctcggctgaggacagatacgtgctgagtgggtcgggcagggaggaggggaaagtcgccatttggaaaggcgaataaacgtggctgagtctgccaagtggaactgtgccctatgtgtggggactggctgccccctagagcctgccaggagcagaagcctggaggggtggcagggcagagcagcccaggctcagcatggagcccacttaccgtgtggccagccgcgagacccatggccacgcaccttctctcaggccttcgggccccctggttaaactgcaccaagggtgtttcctgttggggtgtgtctcaggcaggcagctgcgtcttgttggtgataacctctgctgggaggttactttgttgcctagaaagttctggaatccacaaccaggggctggcactggagccagcagcttggccgagtcacaggtgacccgtggccctcacgtctctggttttacctttccttacttcattcattcactcacccagtccttacgaatcaccgaggaacactgggctgagcacatgacagggagcctggagccccggggcctccagcgaggcctgagaagggtggttcgggtaaccactgtgggctctctcccatcacagaaggtggacagggcctacccaggtggaggggaccaccctgcgatcaggtgtttgcgacaggggttgggccagctgaggcaagctgtcttttttcccttttctttttaatagatgcaacatttttataataatcctagagaccttttttctaccaaagatcacagaccagaaaaagttccatctaaaatatcatgcccaggaaagcacatgggatcaaaagtaaaatagcatcatgtgtgatctcgtcttccagcgtgccgctcagttccccgaatccgtgtgcacacgtgtgatctcgtcttcagtgtgccgctcagttccctgaatccgtgtgcacactgcgtatgtgtacgcgcagcatgctatactgaactcaacaagatcttggctgtacataaatatttgtaaaagagaccctttgcacctttttactgtcatgttgagacttcattacttaaatgttctacggaaggttctggtgtggttgttggagccggagggagcgtgtcagcacgtgctgagggcatggggcctgccccctgggcacccatccacaagctgggccacggagctccagcttctcaggacaaagccccggggctggcgcatcctgagggtctctgggggtgtttgccaggctcctgggatgggccgctttcagaagccctgcagtgcctccagatggaaaggcgggcccggcctccggttgggtctgcattttggagagtccacaccacggaccaggttttcccccaaggcttggctttgtgtagctactaacttcttggggcattctgagagtgtgggcagagagaattatgtggcctcatcctcccccaaggctgtgcttgcagcccgggcaccttcccactttctagctctggagaggttggattttgcttttgtaaacacatgaatccttatgataaaagtctgtcagtcaaaaatacatttataaattatttaatgccagtcctcatgtaacctcaggtatcttcagcttgtggagaataaatctggtttaat

SEQ ID NO: 1785 - protein, 1019 aa, Homo sapien
ADPESPILDLDLHLPLLCFRPEKVLQILTCILTEQRIVFFSSDWALLTLVTECFMAYLYPLQWQHPFVPILSDQMLDFVMAPTSFLMGCHLDHFEEVSKEADGLVLINIDHGSITYSKSTDDNVDIPDVPLLAAQTFIQRVQSLQLHHELHAAHLLSSTDLKEGRAHRRSWQQKLNCQIQQTTLQLLVSIFRDVKNHLNYEHRVFNSEEFLKTRAPGDHQFYKQVLDTYMFHSFLKARLNRRMDAFAQMDLDTQSEEDRINGMLLSPRRPTVEKRASRKSSHLHVTHRRMVVSMPNLQDIAMPELAPRNSSLRLTDTAGCRGSSAVLNVTPKSPYTFKIPEIHFPLESKCVQAYHAHFVSMLSEAMCFLAPDNSLLLARYLYLRGLVYLMQGQLLNALLDFQNLYKTDIRIFPTDLVKRTVESMSAPEWEGAEQAPELMRLISEILDKPHEASKLDDHVKKFKLPKKHMQLGDFMKRVQESGIVKDASIIHRLFEALTVGQEKQIDPETFKDFYNCWKETEAEAQEVSLPWLVMEHLDKNECVCKLSSSVKTNLGVGKIAMTQKRLFLLTEGRPGYLEISTFRNIEEVRRTTTTFLLRRIPTLKIRVASKKEVFEANLKTECDLWHLMVKEMWAGKKLADDHKDPHYVQQALTNVLLMDAVVGTLQSPGAIYAASKLSYFDKMSNEMPMTLPETTLETLKHKINPSAGEAFPQAVDVLLYTPGHLDPAEKVEDAHPKLWCALSEGKVTVFNASSWTIHQHSFKVGTAKVNCMVMADQNQVWVGSEDSVIYIINVHSMSCNKQLTAHCSSVTDLIVQDGQEAPSNVYSCSMDGMVLVWNVSTLQVTSRFQLPRGGLTSIRLHGGRLWCCTGNSIMVMKMNGSLHQELKIEENFKDTSTSFLAFQLLPEEEQLWAACAGRSEVYIWSLKDLAQPPQRVPLEDCSEINCMIRVKKQVWVGSRGLGQGTPKGKIYVIDAERKTVEKELVAHMDTVRTLCSAEDRYVLSGSGREEGKVAIWKGE

SEQ ID NO: 1786 - DNA, 493 bp, Homo sapien
ttttttctggagattttttttttaatcctttttagttcaacataaaatgagaaagaaaaaaatatttctgacattttcaaagaacagaaataggaaagtatgttcatatacattcaacgtatactgcacatattggttactacaatacaaagcaatgagttttttttaaagtgtagtttgcaagatggcacggttagtaggctcactggctttcatctgttgttgctggagggtgcagtctgctctcccatacatacagtaccatgtaaacacatcaggctgagcgcgtggtggtggtagggcaggttgggggcataagagttggaacaagcgcagataagtcaacagctttttagggctttcttggtaagcccccttctggtgagtagttggtgaccccaccaagtggaggggagactggggaccatggaaacatgggacagctcccacgaagggctcttgcactgcagaattccactcaagggatcttggg

SEQ ID NO: 1787 - DNA, 1146 bp, Homo sapien
ggcacgaggccgcgatgccgctgctcgtcgaggggcggcgagtgcggctgccgcagtcagccggggacctcgtccgagcccacccgcctttggaggaaagagccagacttctcagaggtcagtctgttcaacaagtgggaccccagggccttctgtatgttcagcaaagagagcttgcagtgacctccccaaaggatggctccatctccattctgggttctgatgatgccactacttgtcacattgtggtcctgaggcacacaggtaatggggccacctgcttgacacattgtgacggaaccgacaccaaagctgaggtccccttgatcatgaactccataaaatccttttctgaccacgctcaatgtggaaggctggaagtacaccttgttggaggcttcagtgacgacaggcagttgtcacaaaaactcactcatcaacttcttagtgaatttgacaggcaagaagatgacattcacttagtgacattatgtgtgacagaattaaatgaccgggaagaaaacgaaaaccactttccagtaatatatggcattgctgtcaacattaagactgcagagatttacagagcatcctttcaagatcggggtccggaggagcagcttcgtgctgcgcgaactttagcaggaggaccaatgattagcatttatgatgcagagacagaacaacttcgtataggaccgtactcctggacaccatttccacatgtggatttctggttgcaccaagatgacaagcaaatactagagaatctttccacttcgcctctggctgagccaccccactttgttgaacatattagatctaccttgatgtttttaaaaaaacacccatctccagctcacacactgttttctggaaataaagccctactctacaaaaaaaatgaagatggcttgtgggaaaagatctcttctccaggaagttaaaaaacatgaattaccaaagaaagcaccttcttggcctgacagaccattggtggggctggcacgaatccagatctggatcctacatctgttgggtcttaggcctccttccctcctcagtgtctttcaaatgactttcatcaaatgactttcaaaataaaaccttattttggcaaaaaaaaaaaaaaaaaaaaaaaaaaaa

SEQ ID NO: 1788 - protein, 310 aa, Homo sapien
MPLLVEGRRVRLPQSAGDLVRAHPPLEERARLLRGQSVQQVGPQGLLYVQQRELAVTSPKDGSISILGSDDATTCHIVVLRHTGNGATCLTHCDGTDTKAEVPLIMNSIKSFSDHAQCGRLEVHLVGGFSDDRQLSQKLTHQLLSEFDRQEDDIHLVTLCVTELNDREENENHFPVIYGIAVNIKTAEIYRASFQDRGPEEQLRAARTLAGGPMISIYDAETEQLRIGPYSWTPFPHVDFWLHQDDKQILENLSTSPLAEPPHFVEHIRSTLMFLKKHPSPAHTLFSGNKALLYKKNEDGLWEKISSPGS

SEQ ID NO: 1789 - DNA, 8511 bp, Homo sapien
gttcgatgaaagaattgccgcttttcaaacaaagagtggaacagcctcggagatgggaacagagagggcgatggggctgtcagaagaatggactgtgcacagccaagaggccaccacttcggcttggagcccttcctttcttcctgctttggagatgggagagctgaccacgccttctaggaagagaaattcctcaggaccagatctctcctggctgcatttctacaggacagcagcttcctctcctctcttagacctttcctcaccttctgaaagtacagagaagcttaacaactccactggcctccagagctcctcagtcagtcaaacaaagacaatgcatgttgctaccgtgttcactgatggtggcccgagaacgctgcgatctttgacggtcagtctgggacctgtgagcaagacagaaggcttccccaaggactccagaattgccacgacttcatcctcagtccttctttcaccctctgcagtggaatcgagaagaaacagtagagtaactgggaatccaggggatgaggaattcattgaaccatccacagaaaatgaatttggacttacgtctttgcgtggcaaaatgattccccaacctttggagaacatcagcttgccagcagctctgaggtgcaaaatggaagtcccatgtctcagactgagactgtgtctaggtcagtcgcacccatgagaggtggagagatcactgcacactggctcttgaccaacagcacaacatctgcagatgtgacaggaagctctgcttcatatcctgaaggtgtgaatgcttcagtgttgacccagttctcagactctactgtacagtctggaggaagtcacacagcattgggagataggagttattcagagtcttcatctacatcttcctcggaaagcttgaattcatcagcaccacgtggagaacgttcaatcgctgggattagctacggtcaagtgcgtggcacagctattgaacaaaggacttccagcgaccacacagaccacacctacctgtcatctactttcaccaaaggagaacgggcgttactgtccattacagataacagttcatcctcagacattgtggagagctcaacttcttatattaaaatctcaaactcttcacattcagagtattcctccttttttcatgctcagactgagagaagtaacatctcatcctatgacggggaatatgctcagccttctactgagtcgccagttctgcatacatccaaccttccgtcctacacacccaccattaatatgccgaacacttcggttgttctggacactgatgctgagtttgttagtgactcctcctcctcctcttcctcctcctcctcttcttcttcttcagggcctcctttgcctctgccctctgtgtcacaatcccaccatttattttcatcaattttaccatcaaccagggcctctgtgcatctactaaagtctacctctgatgcatccacaccatggtcttcctcaccatcacctttaccagtatccttaacgacatctacatctgccccactttctgtctcacaaacaaccttgccacagtcatcttctacccctgtcctgcccagggcaagggagactcctgtgacttcatttcagacatcaacaatgacatcattcatgacaatgctccatagtagtcaaactgcagaccttaagagccagagcaccccacaccaagagaaagtcattacagaatcaaagtcaccaagcctggtgtctctgcccacagagtccaccaaagctgtaacaacaaactctcctttgcctccatccttaacagagtcctccacagagcaaacccttccagccacaagcaccaacttagcacaaatgtctccaactttcacaactaccattctgaagacctctcagcctcttatgaccactcctggcaccctgtcaagcacagcatctctggtcactggccctatagccgtacagactacagctggaaaaacagctctcgctgacccatcctgaaatactagttcctcaaatctcaacagaaggtggcatcagcacagaaaggaaccgagtgattgtggatgctaccactggattgatccctttgaccagtgtacccacatcagcaaaagaaatgaccacaaagcttggcgttacagcagagtacagcccagcttcacgttccctcggaacatctccttctccccaaaccacagttgtttccacggctgaagacttggctcccaaatctgccacctttgctgttcagagcagcacacagtcaccaacaacactgtcctcttcagcctcagtcaacagctgtgctgtgaacccttgtcttcacaatggcgaatgcgtcgcagacaacaccagccgtggctaccactgcaggtgcccgccttcctggcaaggggatgattgcagtgtggatgtgaatgagtgcctgtcgaacccctgcccatccacagccacgtgcaacaatactcagggatcctttatctgcaaatgcccggttgggtaccagttggaaaaagggatatgcaatttggttagaaccttcgtgacagagtttaaattaaagagaacttttcttaatacaactgtggaaaaacattcagacctacaagaagttgaaaatgagatcaccaaaacgttaaatatgtgtttttcagcgttacctagttacatccgatctacagttcacgcctctagggagtccaacgcggtggtgatctcactgcaaacaaccttttccctggcctccaatgtgacgctatttgacctggctgataggatgcagaaatgtgtcaactcctgcaagtcctctgctgaggtctgccagctcttgggatctcagaggcggatctttagagcgggcagcttgtgcaagcggaagagtcccgaatgtgacaaagacacctccatctgcactgacctggacggcgttgccctgtgccagtgcaagtcgggatactttcagttcaacaagatggaccactcctgccgagcatgtgaagatggatataggcttgaaaatgaaacctgcatgagttgcccatttggccttggtggtctcaactgtggaaacccctatcagcttatcactgtggtgatcgcagccgcgggaggtgggctcctgctcatcctaggcatcgcactgattgttacctgttgcagaaagaataaaaatgacataagcaaactcatcttcaaaagtggagatttccaaatgtccccatatgctgaataccccaaaaatcctcgctcacaagaatggggccgagaagctattgaaatgcatgagaatggaagtaccaaaaacctcctccagatgacggatgtgtactactcgcctacaagtgtaaggaatccagaacttgaacgaaacggactctacccggcctacactggactgccaggatcacggcattcttgcattttccccggacagtataacccgtctttcatcagtgatgaaagcagaagaagagactacttttaagtccaggagagagagggactcattgctctgagccagtcacctgggacctctgctcagaggaccgcaccaggaggctgcgcccaggatttgtcgggagccacgctgagtggcaagcaggaagagggacaggcatgcggggcgtgaccacagtggaggagacaggtggatgtggaaccacaggctgctcattcagcacctttgttgttactgtgaacgtgaatgtgggccagtatcaagagagtctctctgagtgactgcaccatggcactggcaccagggcgactattagccagggcagaccactagacttcagtgcagggacctggttttcccttcgtttgcactttagtaaattgggtgggaggtttccttttggatctgttttgagactgttccagaaagaaggcttcctttcccgagacacttccataggcagcaatttggtgattcatttgcagcaaaatactggcttgttaattattttcctgcccagcgcctgcgtgctaaacaacagatgaggatgagcgtaccactgaagtctgaagatgtcgccattgaacggacagtgttttcatatgtttctaggttgtcttatgctacagtttccaagccagcccccacagtgaggaaatgtgtgaggcaccgcacacaactgcaatgtgttttttaagtcaaggtgacacatgtatttaagatttttttttaaaatctctttgcagttaaatctcactttttcaaacaagcctggatcagggcaaaacaacttatatttggttttagctggaggctcagcaggcagattgcaggcaggggggcacttttcatccatgagggcccagcctggggcctgggactctgatcaccattgtggaggccagaggcagctgcgtatggaggagaaatgtcaaactgaacgcaggtttcaccactctaggaaagcagcttgttgagcccctgcagctggatgtggttagagggatgggctgaataggcaggttagatttcctgcatcaacagtgctttgggaagctgtgtggattcctgaggaagaacagggagccgagatggagccacacatgagtttgctcaccggctactgcagcactttgtacccagaatctcatgtccacaaaccccatgtaaactttcaaccactcaaagctgtttattcggctgaagaaataacttttttttctcacccagtcatttgtacctcttcatatggctatgtcgcaccctccagaaacgtggttatacttccagtcagtgtgggagaactgaagacttccggttggtcgaggaactgagggttgaccttcgggaaggaagttccactcatcttatttattatgcctgtgatgtgggtcctgccagggagacatccagtactcggtgtctttaattgccacctggggaactgtgtttattggccttctttggggcatcctggttttggatgaagtgaggggaatacagaggtaaaagaattgtctccaccctgaagcggggagtcccgcttcacatttctggaaatggtgcagccactggggacagttctgccccgggcatggttgtttcttcaaggtcctctaaatataatccctattcttacataatccttggccctgatggttttaagcaagaactcctgtgtcccatggtctccaccactcaccatcaccctgctgtagcaagagtcctagtcaggggaggtgcattttagtagttaaattgcacttatccatgagataaataaaaggagaactgtttttatcagtggaggctaacctaaaatttcaaagtgtcgcctttttgaaatcttgggcctctctctctgtagaaccaatggccctttgtggctcacggcctcgcacctaactggagagttctgagctcctgcagctcacctgagcccacagactaggcttcttggctccttccgcagcatgcctgctcacccccagaacccgcagctgtgggaagagccatgtagggaggctattcccaggcatacacttccactgccttcagctgacgtcacagctgacaaatcatctcctctatcggagccagaagacttcagctccacaaaatgaagtgttctgtcctgaaaacattcttgggaagaatcccaacatcgagaaaacggtgtcctgtgagttccaacaatgcttcttgttcatgggtttcttccgtatggagtggattaagagtgttttattttgttgttctaactgagaaaaaaaggaggcacccacaaggttgaggtcacacagtctccacagtttccaggaggcgtttgggggtggggaaggcacctccagagcatgaggctctaaggggacatgagtaaagcatgtctgtgacccagtgaggaagggagaggccagctgcactcctgcacggggttcctagctgcagaagggtcccgcctaggccgaggggaaacacctgatagcagaagaggcctggatgcacacctggcacgccgaggctctccgcccagacacagtgctccatgtcagcccctgcacctggggtgtgtgattcacgtgcacagatgccacaatcctgcaccaatatcccacagatgggggaaggtgagaggaaggggcaagtgatgtgtaactgctcaagagatgcttaaacctccatagagaggagccgggcgcaggggcatctgtgtgtcccgtcacacactgcagcagggaagggtggctggctggctccctggcatcagtggtttggtttaagctccagagggtcttattgccattgtcttttcctctgccccttgagccagcctaaggccctggagtctgtttctttaggcggatgaactgacatgctcctaccatgaccaggctctgggcaaggctcctcacagtatccttgagaggtgggcatggaagtgcccatttctcaggtacagaaaccttcagagaggataaatagcttgccctgtagaagcaggactgaaacccttgtccgcctgactcccccagctactctgcccactgtagccccctgccttactgtcctggcacacccctcaccatcctgtataccttaaatatcaaagagggcaagagagaaagggctttaaagataagttatttttttaaggaaccttaatattatttttaagaagtaaccaaattagtgacgtgaaatgcaaaaaaaaaaaaaaaaaatgctgactacccttttgaaaatgtgctttcagattgttttttatgtgtaattcttagacacttgtcattaagaaaatagtggctggcttgtgctcagcaagaagcacactggcacgtggctttggtataggaagtggaaggcaaggacctgggtttctgacaagtgcagtcagacatacacatccatctgagagctgcttgccttgttcccgtggtaaggccatggctcccacatactggaagcatatttttgtgaactgttttcagaattgggaacatattcagtggaatgtcttaaacgctgacacatcttcctcctttgaggggaagtatattttcagaagcagctaagacatttagagccaaaattgctgataggtggttcagtcaagttggctgatggcatctgaggtcaaaaactaagatgtgacgattgagttcttaaagaggtaactcttaaagtgggcccaagggagaaggcagcatctttggactcctaggctggatggctacccaagaatatgccattgaaggatgacacctattcagatgtgaaagttcccagagcaggcacctttgggtcacccaccacgtgtggctttttggtgcctgcatgaaactgtgttgccccctggtgagatgcccgggtgtcctgtaagccgatttaactctgcctgaggaagaggagctgtccactccagttgcccttggctaagtttagcctaacacacagggttttgacccatagttctaaaatacacaaattttgagactacagcacttctttggaaagaggaagaatgcaaagttcagtatttcaatactttgtattttacttgaaattacccttagtagcatcttttttttcctgtctgaaagcttttgtgtggatgagaagggacatttcatttcctcccttaacaaagtgtcattctgaggttctcatgtgtgtttttggaaatagagatactggttttgtagagtttgcctttgggtatgttttctttttttcttaaatctccaaggaagagaactgactaaaatagtaggaacatgaaagtattaaatgccaattaatttgttgtagtaaagtatcttcattagcgttatactccatcatatctggtgtaaactgctcacagaaaaccctatgaaaccaaagggggaccattcaggtctaaaaagcgacaggtccgagactgggtctgtcacctgggcattttcaaagaggacattttgaagaatttgcatattcagatttttaaaatgcacttaacatacttcattacagatttcttgggtagggaggatgggataggccagggatgggatggaatcagttctgcctgggaaactaatccgaatcatttacctttctgtattaaccttggcctgtcctaaaaagagaacgactgtttcatcatgagttgctctgagttttgttaatgtttgtgttggtggattgacggttaaatgaagcatttagctggaatatgaactttgggagttttcatgttgtcctggatttctctttgtaaacctttaaaccttagcccctggttgattgtgttaaacccattatgagaatgttatttaaagttgtattataattgcaacctccactaattattcagtactgtagcagcaaagtattatttgtaagaatttggttatttttatacttatatccactctaagtctggcgttctagtcagtaaaatgatgcaataaaattaatatcattttaaaaaaatctatgtcgggtgcggagaaagaggtaatgaaatggcaggaattcgatatcagcttatcatacct

SEQ ID NO: 1790 - protein, 1165 aa, Homo sapien
FDERIAAFQTKSGTASEMGTERAMGLSEEWTVHSQEATTSAWSPSFLPALEMGELTTPSRKRNSSGPDLSWLHFYRTAASSPLLDLSSPSESTEKLNNSTGLQSSSVSQTKTMHVATVFTDGGPRTLRSLTVSLGPVSKTEGFPKDSRIATTSSSVLLSPSAVESRRNSRVTGNPGDEEFIEPSTENEIWTYVFAWQNDSPTFGEHQLASSSEVQNGSPMSQTETVSRSVAPMRGGEITAHWLLTNSTTSADVTGSSASYPEGVNASVLTQFSDSTVQSGGSHTALGDRSYSESSSTSSSESLNSSAPRGERSIAGISYGQVRGTAIEQRTSSDHTDHTYLSSTFTKGERALLSITDNSSSSDIVESSTSYIKISNSSHSEYSSFFHAQTERSNISSYDGEYAQPSTESPVLHTSNLPSYTPTINMPNTSVVLDTDAEFVSDSSSSSSSSSSSSSSGPPLPLPSVSQSHHLFSSILPSTRASVHLLKSTSDASTPWSSSPSPLPVSLTTSTSAPLSVSQTTLPQSSSTPVLPRARETPVTSFQTSTMTSFMTMLHSSQTADLKSQSTPHQEKVITESKSPSLVSLPTESTKAVTTNSPLPPSLTESSTEQTLPATSTNLAQMSPTFTTTILKTSQPLMTTPGTLSSTASLVTGPIAVQTTAGKTALADPSEILVPQISTEGGISTERNRVIVDATTGLIPLTSVPTSAKEMTTKLGVTAEYSPASRSLGTSPSPQTTVVSTAEDLAPKSATFAVQSSTQSPTTLSSSASVNSCAVNPCLHNGECVADNTSRGYHCRCPPSWQGDDCSVDVNECLSNPCPSTATCNNTQGSFICKCPVGYQLEKGICNLVRTFVTEFKLKRTFLNTTVEKHSDLQEVENEITKTLNMCFSALPSYIRSTVHASRESNAVVISLQTTFSLASNVTLFDLADRMQKCVNSCKSSAEVCQLLGSQRRIFRAGSLCKRKSPECDKDTSICTDLDGVALCQCKSGYFQFNKMDHSCRACEDGYRLENETCMSCPFGLGGLNCGNPYQLITVVIAAAGGGLLLILGIALIVTCCRKNKNDISKLIFKSGDFQMSPYAEYPKNPRSQEWGREAIEMHENGSTKNLLQMTDVYYSPTSVRNPELERNGLYPAYTGLPGSRHSCIFPGQYNPSFISDESRRRDYF

SEQ ID NO: 1791 - DNA, 5727 bp, Homo sapien
cgcccttagccgatcggggcgctcagcccacacgcaccgctgctcggggcttggagatccgcgcaggctgggctcccggacgcggcggaccgacgcgcggaggatcgggatccggcgctgtggggctggggtgggcgggggaggctgggcccggggcctctggcgcgacacccgcatgaggacgcgagtgaaatagaccaaggtggaatttccaagggaaaagcttcggggtggttttggtccatttctccagcgaagaagtagacatggcgagcgactccccggctcgaagcctggatgaaatagatctctcggctctgagggaccctgcagggatctttgaattggtggaacttgttggaaatggaacatacgggcaagtttataagggtcgtcatgtcaaaacgggccagcttgcagccatcaaggttatggatgtcacaggggatgaagaggaagaaatcaaacaagaaattaacatgttgaagaaatattctcatcaccggaatattgctacatactatggtgcttttatcaaaaagaacccaccaggcatggatgaccaactttggttggtgatggagttttgtggtgctggctctgtcaccgacctgatcaagaacacaaaaggtaacacgttgaaagaggagtggattgcatacatctgcagggaaatcttacgggggctgagtcacctgcaccagcataaagtgattcatcgagatattaaagggcaaaatgtcttgctgactgaaaatgcagaagttaaactagtggactttggagtcagtgctcagcttgatcgaacagtgggcaggaggaatactttcattggaactccctactggatggcaccagaagttattgcctgtgatgaaaacccagatgccacatatgatttcaagagtgacttgtggtctttgggtatcaccgccattgaaatggcagaaggtgctccccctctctgtgacatgcaccccatgagagctctcttcctcatcccccggaatccagcgcctcggctgaagtctaagaagtggtcaaaaaaattccagtcatttattgagagctgcttggtaaagaatcacagccagcgaccagcaacagaacaattgatgaagcatccatttatacgagaccaacctaatgagcgacaggtccgcattcaactcaaggaccatattgatagaacaaagaagaagcgaggagaaaaagatgagacagagtatgagtacagtggaagtgaggaagaagaggaggagaatgactcaggagagcccagctccatcctgaatctgccaggggagtcgacgctgcggagggactttctgaggctgcagctggccaacaaggagcgttctgaggccctacggaggcagcagctggagcagcagcagcgggagaatgaggagcacaagcggcagctgctggccgagcgtcagaagcgcatcgaggagcagaaagagcagaggcggcggctggaggagcaacaaaggcgagagaaggagctgcggaagcagcaggagagggagcagcgccggcactatgaggagcagatgcgccgggaggaggagaggaggcgtgcggagcatgaacaggaatacatcaggcgacagttagaggaggagcagagacagttagagatcttgcagcagcagctactgcatgaacaagctctacttctggaatataagcgcaaacaattggaagaacagagacaagcagaaagactgcagaggcagctaaagcaagaaagagactacttagtttcccttcagcatcagcggcaggagcagaggcctgtggagaagaagccactgtaccattacaaagaaggaatgagtcctagtgagaagccagcatgggccaaggaggtagaagaacggtcaaggctcaaccggcaaagttcccctgccatgcctcacaaggttgccaacaggatatctgaccccaacctgcccccaaggtcggagtccttcagcattagtggagttcagcctgctcgaacaccccccatgctcagaccagtcgatccccagatcccacatctggtagctgtaaaatcccagggacctgccttgaccgcctcccagtcagtgcacgagcagcccacaaagggcctctctgggtttcaggaggctctgaacgtgacctcccaccgcgtggagatgccacgccagaactcagatcccacctcggaaaatcctcctctccccactcgcattgaaaagtttgaccgaagctcttggttacgacaggaagaagacattccaccaaaggtgcctcaaagaacaacttctatatccccagcattagccagaaagaattctcctgggaatggtagtgctctgggacccagactaggatctcaacccatcagagcaagcaaccctgatctccggagaactgagcccatcttggagagccccttgcagaggaccagcagtggcagttcctccagctccagcacccctagctcccagcccagctcccaaggaggctcccagcctggatcacaagcaggatccagtgaacgcaccagagttcgagccaacagtaagtcagaaggatcacctgtgcttccccatgagcctgccaaggtgaaaccagaagaatccagggacattacccggcccagtcgaccagctagctacaaaaaagctatagatgaggatctgacggcattagccaaagaactaagagaactccggattgaagaaacaaaccgcccaatgaagaaggtgactgattactcctcctccagtgaggagtcagaaagtagcgaggaagaggaggaagatggagagagcgagacccatgatgggacagtggctgtcagcgacatacccagactgataccaacaggagctccaggcagcaacgagcagtacaatgtgggaatggtggggacgcatgggctggagacctctcatgcggacagtttcagcggcagtatttcaagagaaggaaccttgatgattagagagacgtctggagagaagaagcgatctggccacagtgacagcaatggctttgctggccacatcaacctccctgacctggtgcagcagagccattctccagctggaaccccgactgagggactggggcgcgtctcaacccattcccaggagatggactctgggactgaatatggcatggggagcagcaccaaagcctccttcaccccctttgtggaccccagagtataccagacgtctcccactgatgaagatgaagaggatgaggaatcatcagccgcagctctgtttactagcgaacttcttaggcaagaacaggccaaactcaatgaagcaagaaagatttcggtggtaaatgtaaacccaaccaacattcggcctcatagcgacacaccagaaatcagaaaatacaagaaacgattcaactcagaaatactttgtgcagctctgtggggtgtaaaccttctggtggggactgaaaatggcctgatgcttttggaccgaagtgggcaaggcaaagtctataatctgatcaaccggaggcgatttcagcagatggatgtgctagagggactgaatgtccttgtgacaatttcaggaaagaagaataagctacgagtttactatctttcatggttaagaaacagaatactacataatgacccagaagtagaaaagaaacaaggctggatcactgttggggacttggaaggctgtatacattataaagttgttaaatatgaaaggatcaaatttttggtgattgccttaaagaatgctgtggaaatatatgcttgggctcctaaaccgtatcataaattcatggcatttaagtcttttgcagatctccagcacaagcctctgctagttgatctcacggtagaagaaggtcaaagattaaaggttatttttggttcacacactggtttccatgtaattgatgttgattcaggaaactcttatgatatctacataccatctcatattcagggcaatatcactcctcatgctattgtcatcttgcctaaaacagatggaatggaaatgcttgtttgctatgaggatgagggggtgtatgtaaacacctatggccggataactaaggatgtggtgctccaatggggagaaatgcccacgtctgtggcctacattcattccaatcagataatgggctggggcgagaaagctattgagatccggtcagtggaaacaggacatttggatggagtatttatgcataagcgagctcaaaggttaaagtttctatgtgaaagaaatgataaggtattttttgcatccgtgcgatctggaggaagtagccaagtgtttttcatgaccctcaacagaaattccatgatgaactggtaacagaagagcacttggcacttatcttcatggcgttatttctaatttaaaagaacataactcatgtggacttatgccagtctagaggcagaatcagaaggcttggttgaacatatcgctttccctttttcctctccctccgcccctcccagtacagtccatctttcaatgttgcagcctggttgagaaggagagaaaaaggtggcaggaatttccaggagatccccaagaatgctgccttgtctgtggacaaagatggaccatgtgcccttcggaattagggatagaaacaaatattgtgtgctcttaacgattaagctgtgttatggtgggttttcaggtttttaccttttttctttacccctttactctgcaagaatggggaaagaatgcatactgcgaaaatgagtcttttaaattctgtctgcctactagttttaagtatatggtatgttgtaaaatttccaatgatgagagacagcacaataaatgtaccttatctccttaggctgaaggccataactacatagtggagtaatttaagaactctcttgccttcaccaacccaaaaggttgctttttgatagcaactggctaatgaatttttaaaaagagaagaaaaatactagttttcccctcttttgggaaatagattttaaatggctaaactactagccttaaaactactagtctaataaaatcaactaccacttttgtgaatctgacaggccacatttttatatggccctttacagaatggagtgtgttgaacaggatactaacgccattgagttgagctggcctagcgatggagggacactctaacacaactttccctcagctattatgcaacagatcagggaaaaagatgggatgacagatggggtcagacagaaagagcttctgggaaacaagcttacatagtcttttttaaaatgcacaaagcctcccagctaagaggtcacttggtttgggcttcattaggactgagactttgttgagttctttctgggacttggagagtggatgatattcaggctctgaacattcccagcgctctcccgagggtgccactttctcaagatgaaaactgtgactgaaaaaattaataataaatgtttctgagctgcctgtgttctccctgtgtgggtgagagaagggactagactcctaagcctgcctcagatacaagaggcatcattggctccaattttagagaacttgaaagcaaggctttggacaaaattttgagaccctaatcactttaccttcctccaaattacccaacatacggtaaacaacatttgtgcagaagtatgtatgtatttagttcaggttgacttgtgtccttataaactcttactcaaatgatttgaacttt

SEQ ID NO: 1792 - DNA, 830 bp, Homo sapien
aaaggactcccaagaactggagctggaaggaacaggagtgtgtttcagcaaacagccttcatccaaaatggaggagccaggcccccgcttcagtcaagacctgcctagaaaaaggaagtggagcgggagcaccgtccagcctccgtgcagccgtggcgtgcaggactcgggtggctctgaggtcgcctggggaccccagaagggacaggctggcctgacatggaaggtgaaacaagcagcagcccctgccttcaggagaactctgcagactgcagtgccggggagctgaggggtcctgggaaggagctatggagtcccatccagcaggttacagccacatcctctaaatgggcgcgatttgtcctgccacctagaaaaagttcacatgtggacagtgagcagccaaggtctcttcagagggaccccaggccagctggtccagcacaggctaagcaagggacccccagagcacaggcctcaagagaaggcctcagcaggcccactgccgctgtccagcttcctcgggccacacaccccgtcacatctgggtctgagaggccttgcgggaagacctcatgggacgcaaggactccctgggcagagggtgggcccctggtcctggaggcacagaatcctcgacccacacgactatgtgacctctttataactggggaagacttcgatgatgatgtgtgatctgggactggcaggttattaatcgagatacacttgttaggagggacagggttcccctaaggcacttttaaagatactctgtaagaaccattaacaataaacttactgtcaatcaaaaaaaaaaaaaaaaaaaa

SEQ ID NO: 1793 - protein, 158 aa, Homo sapien
MEGETSSSPCLQENSADCSAGELRGPGKELWSPIQQVTATSSKWARFVLPPRKSSHVDSEQPRSLQRDPRPAGPAQAKQGTPRAQASREGLSRPTAAVQLPRATHPVTSGSERPCGKTSWDARTPWAEGGPLVLEAQNPRPTRLCDLFITGEDFDDDV

SEQ ID NO: 1794 - DNA, 1086 bp, Homo sapien
gggcgggcccgcacccctgcgaacatggcgctgcgagtggtgcggagcgtgcgggccctgctctgcaccctgcgcgcggtcccgttacccgccgcgccctgcccgccgaggccctggcagctgggggtgggcgccgtccgtacgctgcgcactggacccgctctgctctcggtgcgtaaattcacagagaaacacgaatgggtaacaacagaaaatggcattggaacagtgggaatcagcaattttgcacaggaagcgttgggagatgttgtttattgtagtctccctgaagttgggacaaaattgaacaaacaagatgagtttggtgctttggaaagtgtgaaagctgctagtgaactctattctcctttatcaggagaagtaactgaaattaatgaagctcttgcagaaaatccaggacttgtaaacaaatcttgttatgaagatggttggctgatcaagatgacactgagtaacccttcagaactagatgaacttatgagtgaagaagcatatgagaaatacataaaatctattgaggagtgaaaatggaactcctaaataaactagtatgaaataacgcaagccagcagagttgtcttaaattagtggtggatagaagacttagaatagaaacttttagtattaccgatggggaaaaaaaaactactgttaacactgctaatgaaagaaaatgccctttaactttctaatgattatagataaatataatatgcgtctttttcacaatatcctatgatttttagactaggctctagtgttcagaattcatgaaattatccatggtaaaaactagttataaaaattacataattcaaagataacattgttattcttaagccttatataatattgtaacttgcatgtatccatacctggatttgggatgaaatacttaatgatctttccattggaaataactggaagtgaagaggttttgttgcttgtacagtgtcagatgaggaacaccactatcttaattttgcgatacactgcatttgctggtgctatttttatacagtgaagcaacagctttgcagcaaaataataaaatacttcttcgtt

SEQ ID NO: 1795 - protein, 173 aa, Homo sapien
MALRVVRSVRALLCTLRAVPLPAAPCPPRPWQLGVGAVRTLRTGPALLSVRKFTEKHEWVTTENGIGTVGISNFAQEALGDVVYCSLPEVGTKLNKQDEFGALESVKAASELYSPLSGEVTEINEALAENPGLVNKSCYEDGWLIKMTLSNPSELDELMSEEAYEKYIKSIEE

SEQ ID NO: 1796 - DNA, 1746 bp, Homo sapien
gatttcttttagtcatgttgatttgatttcagtttctggctatgaaaaacatttttaaactcgtcacccacaacaaactgaacaaaactactacagtgaaagcccttttcagtgaaagatgtcagaaacctcaaaacctttggcctgactcagaactaccatgtgaaaatcagtactctcttaatgtttgaaataaaaactgaaaaaaaaaacaaaaaaacaaaaaaccttttttgaagcaccttaacgtggccatccatttgagaagtgggtgccactttttttctttgagcaccttattgatgtgtttgctatctgctgtctttctgttacctgttggctgaatggctagctgttaacatatacatgtgcacagaagagatatctgggcatgtatgttctcaatgaagtttactgtggtgactgctgaaaggtgaacccatttcctgatttttcccgccgcagtgttgtgataagattcgaagaaacctttttccctgcacagaaatgtttcttatcacattgtatcttagtatggaaaggaatatggtcccttttttgcaattgctactgtgtacacacacacacacacacacacacacacacacacacacacactctgtatgtttagacctaaaatacacacacccacgcacacactgtatgtttatgtgacctaaaacatacacacatgcacacacacatacatatccattcattcattcattcaagtggtgtttccagtgtctgtgtgtcactgtttatgcagtttccatttcccagtgaattatgagtggagggcaacttttctaaccagattgtcttttcagaacaaagacctgggaattgaggaagagtttggaaagagggagaggcaaggaaagagagctttaaattgaaaggttaatttcctaagaggaacctgggctgaatgactacagtgttataccctccaatctttgcaggtgggcatggaacactgcttgtatcactctgtgcacggtataaatccatatatccacaaaaacacacatccatccatcaacatatacatggtttgggatgagcaggtcaatagttttgagagggagtttgttcctttttttttctcattatactcttaaattgttgtcagttatcaaacaaacaaacagaaaaattgtttggaaaaaccttgcatacgccttttctatcaagtgctttaaaatatagactaaatacacacatcctgccagttttttcttacagtgacagtatccttacctgccatttaatattagcctcgtatttttctcacgtatatttacctgtgacttgtatttgttatttaaacaggaaaaaaaacattcaaaaaaagaaaaattaactgtagcgcttcattatactattatattattattattattgtgacattttggaatactgtgaagttttatctcttgcatatactttatacggaagtattacgccttaaaaatacgaaaataaattttacaaggtttctgttttgtgtggaagagtaattgatgttgctaagaatgatgtttgtttttttggggtttttgttgttttttttttaaatgttaccagcactttttttgtaagtttcactttccgaggtattgtacaagttcacactgtttgtgaagtttgaatatgaaggaataattaaaaaaaaaaaaaactcttaaaaaaaaaaaaaaaaaaaaaaaaaaaaaaaaaaaaaaaaaaaaaaaagggcggccg

SEQ ID NO: 1797 - DNA, 23213 bp, Homo sapien
gcggccgcccgcgggcggagagggggcggcgcggcggcaaggcgcgcgggcggggcggggcgcgccgagggggcgtggcgcggcgtctgcgcagctgccagcgcctttaagcccgggctcgcgctctcggaccgtgctttcgccgcctgggagccgtccggcgcagcagtttctaggtccccactgtccccgccgtcccgccccttcgcgtcccgggaaccggttggcttccgagccgcactcgccgatcctccaggcatgccccgctacgagctggctttaatcctgaaagccatgcagcgggtaagtgaccttccctcagagccggttttcccgcgcgggcgccccctgtgcttgtcatgacccctatattgaggttggcaaatagatgtatgtttatgtgttgaataaaataattaataaaataattaaggtacgtatatatagttttatgactggatatggctttgggtatgaaggcttctgctttatagaaaaatgctgatttttttgttttctattataaatgagtagaaaaaccttgtaagatctgaaatgaagatactggatgtgttaccatagaataaacaaagactggcattgggagactagaaggagctttagaggcagatgggactgggttttggattgtagcacctacttcctaaggactttaaccttctggatcctcagttccttctttgtaagccggaagtaattcatttgggagggtatttgaagataaagtggttatgtgaccttggaggtagttaagtgtagttctgtcattaaagtagctttgtggtcttaggcaagtcgctgtgaacttcattgcctagtttttcattattcccagtttattaatgaagaaactctaaaagataaaacttattatatctaagtttatttcatcagaatcccaaactagatcaaagctgaaatacagttgcttgttaagtaaatgtttgaattagtggtgttggtgcttactactctgctcccatctattattgccatgaggggtgtgggcctggttttgccagctttttttttctctcttcctcctaccagccagaaatccagattttataggaaatctggttttttttttttgatgttgccaactaattgaatacttaggtaccatggatcaaatgtaatgtatctgtgggttaggttggctctcattttgtaatctagatattcagataattagctgtaggttgtctgtaaatctcttagcatttatgttgacaaagcccaccttgttaattggtcactggtttgcagtaggactgatttcagcaatggcaggcatattcaattcttgaaagtatctatagtttcggattgttgggttgtatatgtgcatttaggctaaaatatacatgtaggcttcagagctgcaccgtgtaaactgtgagggagtgacattcacagtccactttttctttcaatgtctgagtgatatcttgttttaggcatgtattagtactatttggtttgtacccattgtattaacctcttaggtgtttgaaatactactggcatgcaaagattgctttgcctagaaaatatttttttttgctcagagtgtatctgtggaattaaaaatagtttacccatgatccctggaaaatagtattaccatgaaaaaaattcaggtgctctcttggtaaagattatagaggagggaggtgatgacatttttatttttgaccaggctttgtgtttccataaaatagaagccaagttattaccttgactaaccttccttttttgtcttttttttcactcccactccagatagataacatcaaattgcaaataaaacgaactcagatcccaggttgttcttacgtacgttttggcccaaggtgtaattgacttgttttgcttccccttgcaatcatttttactatgattacagtcccaggtaaggtaatttctgtccactttgggcatacctcagtagaggttggtgtagatgaaagcttaaaaatgaaattgcaagtgaaagcacagacttagcaaaacttctttattggagccctcaatcctcataaactggcatttttctgcttctgccccagaatcgagaattcctggttttgtctttgttttgacttgagtttttaaaagtttctctgtaacacctaccctggagtggttaagtgctttaattttgtcaggtgaagaaaccaagtgcagttatggtagccgggttgctgtggatataatccagtttgagaaaattctcattgtggtgatcagaagtgcagtgttgtggttgcatttcagctgctgggaagatgctcttgcaaatccatgtgtcgtctttgcttccgttagaaaggtgcagaatcagtgtaagttccagatatctgctcccttttcattttgtgctcagatgccccgtgtatgaattccgaatataaaacatctgttcagtctggttttgattcagatttaaggtgaatttctgttgctcagttgaaaagctaaatttgagtgtaggctctgtcaggcatgttgtaggaaaggtgtatggtactgaagtgtgtggttttgttttttaactgcttgacactgttaagtaagcaaatgacccagtcatgggttgttttgattgccattcttctgttggtgtactgcttgccttctgttttgttaatagtcatatgagaaaacagttgtatgaagtatagtatcttgaagctttaagacaccaagtttccattaggcagcctaagtctcgcagactttggtagcactgttggtctcatgggaatgccattctcatgtgtggactaagtaagggccaggagattttgcaaattttgtgtgtgtaagaagatcgaagaaaacatttttcctaatgtcactgtcttgagtattttatctgattaggatggactcattggaaactattgataatttcaagatttcttgtcatctggcatacaaagaaaacagtcgtgaccctatttccctggatttttctatccctctacttgtcctgtgtttgcaatgcaagaggaaaatccagctgcctttataatctagaataccatgtttctgtttttatttcttaggtttaattcagggcgtaatttctaccagtccctccaaatactgttaaagttactctttttgtggtcttacttcttacttcttgagtgttatattctccaaaccttggagaaaattagaaggttttaaagttttccaactgaaaagtatctttcagaggaaataccctaatttctgaatcttctatttataacttggcctggagaattataatctggtctaccaggaaggtgcttgtgcttaggttttctgccttagtcacatggaaagatgagcagaagcgattccttctagaaacagtttttttctagaaacataaaattggaaccaagtagactgagaacagaaaaaaaacacaaagttgacctggtaggatgttttacctctataaacctcatagttgctagcctttgagggaggctagatgagttgataataatgcctaaccttagcaatggattgaagtaggggtgcaggggttatgtaggtgtgtatatgtatttaggatatatatacacacctacatattatacacacacacatatgtacaattctcttgaatcctcagccatctaaggttaggtagagctatttccgtgttgggaatggaaaaactgaagaattaaaacacagacttggtcatacgtaatggtaaatacagtagtttaatgaaattttgtattgtacctatcactcagcttcaactgttaatttccagtctgctcacctctgttttctttatcttaaaatttttttcattaatttcccttggctaacatgactaaaaaaatttcagacttaaagagcagttcatttaacacttgtatgatttttgcctagatcactaattgttagaatatgccttattttatctttttttaatctgcgttatttcgagagttgcagacatcttgacatacctttcttaggaataagggccttcctcctaaccacaacatagtcatcacattcaaaacggacattgatacgatactaccaccaaatattcaattcatatagaaatttacgctgttcttccagtaatagtttttagtgttttaattcagtattcaatcaaggatcatatatttacttgtttagtctccttgaacagttccaaagcctttgtcattaataacagtggcactttgaggagttttggagtccaggcctactgttttgcagaaaccctcactttggagttgactgtagttgcgttttcatgattagagttagattagccattgttgacaggaatgagtatttcatagggatgtcaatgcatcacaccgggaggcataccactttgttaagcagtcatttggttaggtggcattcaccagaatgggccattgtaaatgtaccctatttcccttttgtattaagtgatctatggaataacaaacttgagactgaatattttgttttccaacaatctgcattggttttagcatctgttggtgactgaatcagttattgcaggagtactttaaagcaaacttagatatatcatttcacctgtaagtaattagtgtataagaaataaggacttttttttttttttttttgagactgagtcttgctctttcgcccaagctggagtgccagtggcgtgatctcggctcactgcaagctctgcctaccgggtttcacgccattctcctgcctcagccccagctgggactgggactacaggcgcccgccaccgcacccagctaattttttgtagttttagtagagacggggtttcaccgtgttagctagggtggtcttgatgtcctgacctcgtgattcacccgcctcggcctcccaaagtgctgggattacaggtgtgagccactgcgcccggccagaaataaggacttttaaacaaccgtagtgcctttacacctaactacaattccttaacacctcatgttcatgttcaaattccctgaattgtcaaaagtgtctgtctacagttttggttgactctgaatctaaacaaggtccacaaattatgtttgcttaatgaccttaagtctcttactctgtaatagcttcttaccccactctttacctttccggatttggctggtcacttatgctgtttatatatattcttctattccaggtaatttctgtagacccataggttctagaaatttgattagattcaggttttgttttgttttgttttgtaagagcacttaagtggtcttgggagggatagatcacatcaagagggacacatgtctgcattttagagaaaaattaatcttggtgtgggtacagatgttagcagctgcatgcgtccattttgaatcccccagcagcctttctcctgaaaattgtagcatccctgtactcatagcctgggtgcattacttcagggcttaccggtggtgattttcctcattacattagtccttttgcatcagttagctggattttatctgacttgtgtttattcctagtttgtgtttgtgtgtgtgtgtgtgtgtgtgtgtgtgtgtatctccctgaaaggtgttgtaaaaggatgcgttctccatctttatttcaaaaaggatgttcatgaactcccttagtgatcctctcaaatgtcctcagttttctcatttgtaaattggggatcattatcatgtctgcctcttggggtttttgttaggattaaatgagctcaaacatgtagtgtaaaaatagtggttggcacatggtgtttggtaaatgctagttactaaggtaacttctttagttttgtgggaactctgaactcaagttgtaatggagaggtggaagaggattcttcatgagttgacatcagggtgcttgggtttctgttgggtgagctgaagggaattgttgcttgccggcactgacctgctctttcagctgtgtgggaacagttgccagacagacacgcacagggaaggtctgcacatatcactgcacactaagaggtggatgtcgacagttgcagcagtaaaacttgaaacacgttccgcagtggagttagcacagtgaagggaagtgggccagactggtggtaggtggtaggttgagggagatggtggctccagatacaggtttttactatgtcatgggccactgagatttttatctgaatgaacatatttgtctagtccagtttgccttgtcattacacataccctcaactggagctatttgagattgcagatcactggtggaggagggaggaggctctttttccctttagcctctttaatctgcatctcttgttgcttaaaaaaccactgttgatggtaatataggatattggaagtttagcagtcttgatggcgaagaacttagttgttaatatttgatttttttatttaacaaacatttgagcacctgtaatatgtaagatggtgttctggacactaggacacatcagggaacaacacagaaaattctaccctcatggagtttacatacatggtagtgaggagacagaagaaacgtttaagttttatagcgtgttaggtgttgagtactatggataaatacaaagttggaagggaggcattgagatggtcagggaagttacttttgtgcaaagacgtaaaaggagaggagacaggtcttgtggaaacctggggttacaaagtgttgcctgcataggaaatagccagtcccagaggctagtttggtccattgtgatgaaagggttgactgcttgctgtgctagtgccctgtagtgggccaagggcagaagcatggagacaagaggctgggacagtgatctggatgagatggaatggtgatttgaactaaggtgctagtagttgtctttgattctggatatattttaagtatcgccaacaggctttgctgatggattgattgcatgtgggttgagggagaaagtgagcagtcaaggatgactaaaatttttggactgagcaatagtgaggatgaagttgctgttctgagatggggaggattgagagtagaacacattttttgggcaagagcaaattattcataccccggaacaacaggcaactacaacacttcatccattaagagcagttgtccataaattttactgtgagaacccttgcatttgtagattgtacagctaattcctttaacttaatgttttaaagttgtgggagttgataaagattggcttagatagaatctatagctgtgatgactgggtcaagtatagaatacacttaagacttactatttttccccttctggtggaatgactaattaacactgataaaaagaatgaaggcagaaagcgttgaacttggatggtgagaacatagatacgtctggtcttacagctgacccatcagggctttgctgtatgtgaagcctatgcctgggacttctttttacttttaatctctgcattttatccatacacatccattcacatgatcacacaaagatttcaactggtttttatcttacgtgctgtttgcagtcttactttgttaacagttgttacatatccatcttgtgtattttcaagcacaactttttaaacacgcatgatcttttatcaatatcgttaatgtttcttcctgtcagtaatgtccttttcactgaaggtagtattgcatagtgattaagggcaaaagctgtttagacatatagatgtgaggcaacatcctggctgtaacacagacagctgtggcctggggtgagttatactacctcatggcttcagttttctcatctgtaaaatggtcataataattgtacttatctcatgattgttataaggattaaagtaatgcacataaaactagacacagtacctagatggtgttaggacttaggttagtgtaagatttttttttttttttaaatttccattatttataactcacttatctttgataaacagtcttttacaagcagatagtgttgagcctcttgaattcttattgagttacacaaatgtttggttaagattacatagtaataggcattgctgctctgttatttcatatttccttttctttttgagacagtctcgctctgttgcccaggctggagtgcagaggtgtgatctcggctcactgcaacctccacctctctgggttcaagcgatcctcttgccacagcctcctgagtagctgggattacaggcgtgtgctaccacacctggctgatttttgtgtttttttagagatgaggtttggccaggcaggtctcgaactcctggcctcaagtgatccacccgccttggcctcccaaagtgctgggattacaggtgtgagtcaccacgcccagcctgttatttcatgttttcatttatctttaacaaaatgggttgttgggagtttgctcctatatgtgatctagtatcattcacataaaagttaaaaccagtagtagtttcatagttgttcttccctccctgactgccatatctacaaggtcttatttctctgagatttctataaaaaaattcatgatgagccaaacttattggtagaatcaggttaaaatgaatatatcttgggcggagtgtatatggatgaagtaaatctggtggtttatgaacttttctaggtgaataagattttatttgaggaaatggtttactttggaaattatccattcttaacccctccccactcctgtcccgggagaaactgataaaagtagagctgttctggtggtagagggttggaaggagggccgcagtccctccctactctgcctcaacttcacccatcagaatacagcttcagcaccatttgagtccaatcagggttttgtataattaataacttttaaaaagttgagggtgcaagtttaatagaaatgttttgtcaaaaagatttaagggcaaattctttatattttagggatggttaaaacattacggtacaggttgaatatcccgtatcttaaatgcttgggaccagaagtgttttggattgtgggatattgcatattacttggtggctgagcatcccatatctgaacatcccaaacccaaaatgctccagtgagcatttcctttgagcatcatgtcagttctcaaaaagttttggatttgggaggagcatttcagattttgtatttttgcattagggatacttaatctgtagtgttgtctttagctccacttacaatttaaaactggctggagttcaggccagttatattaggaaaacctgttttgctctttgtgttactgatgaaccgctacagtatccttgctccacatttttaaagtaagcaggggttgaggacagtcctatgtgagtacacatacactctgcatcaagcgttagtagtctattccaccacaggaatttgctttcctagaacttgagtcaaggtgacaaaagtgaaagcatgtatgtaaagtcttaagaattttatatacattttttctttttgtattttacttgaagtgatttaagtaggagctaatagttgatgagacagttgggagtctaaaatgtttgagagagctgcatctttaatgcattattttatctaatctttctatatataaataacttgggaaaatcctaatatgccttgcacatagttgacagtttaatttgaaaggaactaatatcacttctagtatattcaggttgtagggagtaaactgacatttactgagccacctccccattgcactgggcaatactagctttctctgttacttattccttataaatcataaggagcaagttggtttcattttaaaagccagacagttgagacttgttgaggctcatagagatgaagttgttgcctgagatcctacagttaggaagtgacggagcatggaacccagcccttaaaaactgtgctgttttcttctgtaccgtgccacctacatagatgtggtacctacacccacctcccttcttacagaatcatgaaatctgtctgttggggtggggagaaaacaagcttgggtatgcccatgttttttgtttttggtaggttacacaaaagtgattgtaattcaggtaattagttttcagaggtgtctgtgtgttctataacccttcaattattagctggctaagtgaatatttttcatttggatcagaggatgagcagggctcatcaagcttaccattgacagagtgctggactaggcgtctcagattgtaccttgagtgtgtggtttgtaaattgactccaaagctaaaagaggtggttgtttggtcacgtttaagattattgcgtactactctttgcaggccccgccctgtgtcattgaacttatgacttgaagccctgagtataggagataatttttcttgttccttgtttggttttagtggcaggtggttttttattttattatttttttgatagagtgcccatatatcctgctgtttacatatagttccagaataagtttctggtttggaagataaattatatggtcacccagacagtactagagagatctggtcatgataactaattacattttggttaacatggttatatcacctgaaggagtgcttatttaaatttggtcttacctttttttctctttctatttggtcaaatgcagcaaatatttatatttacacttctctatttggattaattcttcagttgcaatttaatttatccagatgcgtggaatagaaccaaaactgcattctaattctgtgcaaaacaataaaatactactttctgagaaggatgccttctcttttgggaagaaggggaatctgctctgtttcaaagcacctttgtgttcaaggtttggctaaatctgctcatcaccactaggggactgtttctttttgcattctacaagtattactcccattacagaagctttttaagaaaaaaatggactaccaaggaacccacctacatgcttttcataactatacctattttattgtcttataatttgacttgagaggtttgcgtgaatgatgaactgtgacaaaaagcatatataaatataaaaatacaagttaaaaagcctcatgttagctgaagattttccatgtgtattcttataaaaataagggaaccctggacagtgctcattgtattttgttgaagaaatgttaacttctttaaaagggaggaaaacatatatatatatatataacatactgtatattcagaaccatttttaagggatgtagtttatctcttgaaagactgaaattcaaggctgtgactatgactagagtgtaaaatatagctgcattgcattatagtattttatatatttgtacaaaccaaattgacctgtttttggttttgtttttccttttccagtctttaccaggtgctggtctctgcatgtgttttgttggaagttggaaaatgtagacacgacccacagagtggtatggtatccagtgagaagggaactgtccgcagtggctttgaaggatatgaggaagcctaggcggagagttgagaattcagccttgagctagtgttagggtactatttggtacctctcctgtgggcagagcgactttactagagaagttaggagttagggctagcatgagaacttcatgcagtttgagcattcatcaggcagcagaatatagcttctatatttaccttgcataaatcagatttgacaatgaagaacaatgttactgatagtaacagtgcttcccagtgattgaggaagtgcttgttttctttttcagcactttgttctatgaacaaataaggtgcagcagctagtatgacacataacccaccgtatttcccccccaacggccagatgaaaccagaaatacccactgtgtttttctctcccttctttggaaagcacgtggttggtactgccattgggaagagtgatacctgattagccaggtagccttctgaaaattgaaacaagtggcctgaggatgacttggatggctgttgggtagcagagagccctggaggcagggtttcataactgcgaacagcagttttcattgtaattgacacagcagatttcattgtaattgacaagcttcccttatgcagaaacatttaacgatacctttttaaataatgtttactagtcatctgattagattttattaaaaatttagatgattcgtcctacataatgtcaaagcatttgtttaaaaacttggaagcttttgggggtggggaaggtggtcatagaaatatgatcatcttcaggatttggcaggtatgaagtgatacaaacctcaacttttaagatttttttttttttttttgcttttctctggcaatcaatcttatttatgccagccgttgacacttagaaaggatttaaatcacttttcatagcataattattgtattgcttaatgctttaaaaaggcacgcagatgggattgagacatttctatccaggcagttttttctgcattagacctaagaacctaattttgtagggcagtagtctctaggcattatgtttagctccttttgtcagtgagaagtgtgttgtaaagtttctaatactgtggtctgttttgaacggttttgagaagaggtagctttagtataatttataggacttaaaaggaaaatgcctagaatcatcagaaaaagcatggaaaaacattcttctctgaggttgccttattggaaaaggagaaatcatttagaagttaatgtgtggaaggcattaggttgaataaaattgttgttcgtattgatctgtcagctgcaattacaattaactgaaaatttagtatttgtctctttttcaggagagaagccgtcaaattttaatacatttaattttaggtatatttaaatgtctgttttgcagagtgattatcttaatccagaactgaaaaattcctgatggtcctactgaagatttatctaatggtccacaaatgtctgttttgttgaggtttggcggacataataataaatcattttttagtcttctgaaaacttttctcctcctccctcttttctctgcttcttatacccttcaacaaaaagcattaaaaggaaaacataaaatcacgcctttagtcagtgccgttatcctctcagaggttgttttggaaatactgcctgatgaaaaggaagagaaggaaattgcttcttttaaagtttgctttttatcttcttgcagcatcttctaactggcagaaataatacaatttttgagttgttttgtaagttggatatttttagttttgtgtggaatgtcgtgtttcccattagggcagggggcgtctcacaagatctaggttactgtatgacaactatatccatttactggagtttaagaagctttataacaatacatttccagagactaggcagtacttggttttctgtatttaaattttctgagggtagatgataacatctagtaaacaccacctgcctgttccatccaggaccctaactggccataaagttacccccaaactctcctaggattcatagtattttaagatttcatttttgtgcccttattacgaatataattagtgttttctcccctttagggtgctttaagatcttagtgcctgtcctaatctgagcataccacagtaagacaagaaagggcaatgctgtggtaggcagttagctgctgaagttaggccacttagttatgaggtagatgaatttctgtcctcagctcaaaatgataatattctcactgacaaaagtatcagctgtgatcatatagattgctctttcctgtggaactgaagtgtattaaaaaaattttttttcttccaataaagaatgtctcgttgcgccgggtttgctagactgaaagtttcctcatcacgtggcgagacctcctctacttcaatctttgtcttttgtctctgctgccttgcagggttggtacagtaggcttcactagacttagctgcaactcagaatttctcctccagcacctgagtaaatgctgatggtcttgtggagagtggattaagagtacgagctaagttctcaatcccaattaagaagcggaaaatttaaactgtcttcttcaaagtttatcacaaccaccaccatcaagacagcaaaccaaaggacaaagactttgaccctgctgtgttgctctgtgtagtccagttcacgtatggtttacagacttggctggggttactaaaaataaataaaaagttggacacttctgtcattggagcgctattattcacaagttaccagaatgagagctgtactggacacagcagacattgccatagtggccctgtattttatcctggtcatgtgcattggtttttttgccatgtggaaatctaatagaagcaccgtgagtggatacttcctggcggggcgctctatgacctgggtaacaattggtgcctctctgtttgtgagcaatattgggagtgagcacttcattgggctggcaggatctggagctgcaagtggatttgcagtgggcgcatgggaattcaatgccttactgcttttacaacttctgggatgggttttcatcccaatttacatccggtcaggggtatataccatgcctgaatacttgtccaagcgatttggtggccataggattcaggtctattttgcagccttgtctctgattctctatattttcaccaagctctcggtggatctgtattcgggtgccctttttatccaggagtctttgggttggaatctttatgtgtctgtcatcctgctcattggcatgactgctttgctgactgtcaccggaggccttgttgcagtgatctacacagacactctgcaggctctgctcatgatcattggggcacttacacttatgattattagcataatggagattggcgggtttgaggaagttaagagaaggtacatgttggcctcacccgatgtcacttccatcttattgacatacaacctttccaacacaaattcttgtaatgtctcccctaagaaagaagccctgaaaatgctgcggaatccaacagatgaagatgttccttggcctggattcattcttgggcagaccccagcttcagtatggtactggtgtgctgaccaagtcatcgtgcagagggtccttgcagccaaaaacattgctcatgccaaaggctctactcttatggctggcttcttaaagctcctgccaatgtttatcatagttgtcccaggaatgatttccaggatactgtttactgatgatatagcttgcatcaacccagagcactgcatgctggtgtgtggaagcagagctggttgctccaatattgcttacccacgcctggtgatgaagctggttcctgtgggccttcggggtttaatgatggcagtgatgattgcagctctgatgagtgacttagactctatctttaacagtgccagtaccatattcaccctcgatgtgtacaaacttatccgcaagagcgcaagctcccgggagttaatgattgtggggaggatatttgtggcatttatggtggtgatcagcatagcatgggtgccaatcatcgtggagatgcaaggaggccagatgtacctttacattcaggaggtagcagattacctgacacccccagtggcagccttgttcctgctggcaattttctggaagcgctgcaatgaacaaggggctttctatggtggaatggctggctttgttcttggagcagtccgtttgatactggcctttgcctaccgtgccccagaatgtgaccaacctgataataggccgggcttcatcaaagacatccattatatgtatgtggccacaggattgttttgggtcacgggactcattactgtaattgtgagccttctcacaccacctcccacaaaggaacagattcgaaccaccaccttttggtctaagaagaacctggtggtgaaggagaactgctccccaaaagaggaaccataccaaatgcaagaaaagagcattctgagatgcagtgagaataatgagaccatcaaccacatcattcccaacgggaaatctgaagacagcattaagggccttcagcctgaagatgttaatctgttggtaacctgcagagaggagggcaacccagtggcatccttaggtcattcagaggcagaaacaccagttgacgcttactccaatgggcaagcagctctcatgggtgagaaagagagaaagaaagaaacggatgatggaggtcggtactggaagttcatagactggttttgtggctttaaaagtaagagcctcagcaagaggagtctcagagacctgatggaagaggaggctgtttgtttacagatgctagaagagactcggcaagttaaagtaatactaaatattggactttttgctgtgtgttcacttggaattttcatgtttgtttatttctccttatgaacttaaggatatggtgagacactaacttaagacaatactgactggtctttggggaaaaaagttatgtaactgtgcatctctcaggcattgtttacgctgtaggttttagccaaattttacttagcagaaaatcatctaattacaagactttattttcccagagatggattaaagtaaatcttcaacttaagtgaagccaaacctaacagactgaattgtgcaaatgtggttttaaattttgcataccaaagtaagaagagaccaattattctcacagagcacttagagcagaatatatgttaagttaccatgaattaaggtatactgtctgcactgccaagtcttggcagaccttaccctgaagtagaagatttgctcatttctaaagttttttttctgtctctgtaatccctcctaccattaagaaaaacttatttcttagacattgtacaatcagttatgtactgaaaatcgaatgtgcttgtgtgatacttgtttcaggacaagttcatttgccaggttcattttgttagcatgagcctacggattctgatttcccaaagaaagaatgttttcctgtaggtatttttgtaccaccagtatatggaatgttagggaaaaactttgttccagttcctttttttttttctttctactttcaagtttaagtgaaccatactgaaatgaccaacaagtctgcctgtaaagttacatgtcatgattgtgttgttaaatgattatgggggagaaaatgaagtaaatgttgctgatgatccccatatttattgatcatattaaggttgtttatatagtttggaaatgaccagccccctaagcagtgtttgattaacttatgctaatcagatgattactcatatattctgctaattttctagctttattcttgttatttggaaaaattattagccaaatgccttcctaggtggatccagttggaagatatgtccagaaacctgaagaaaaattgacgctgcctttgtgtgctggattgctctacttgattagatcatgatatatcaaggttgaatttttagagggaaaatttaattctgatatcttattgcatccttgataagtttttccctgatttttttttcctccaaagactttccatctggacacagcctccacatttttgttgtagtgacttagagcataaggatgtttcagtgccaattccggccgtcggtaacagaaaactcagtgcatactttgctgttgttaggttgtcaatatagtctttctgtaggatggatagcatgtttgagaggtgccaaacaagaacttttggggttagtagtgtgtcttgtggagggtattacaggactgtgtaattataggactctaacttgacatggcttggcacccacttgcagctagtgggtacagggtacaaaagatgttagagaaaagctctacagattacgtacttctgtgtcttcgtatgctcaacactgtcctttgtcctccatgaaagatgaaggaagcaaattatgtatgtactttctttgaccttctttaatctctgatactttttagattgcatgattttactaggcttgtatttagggaaattactttcataaatacttttgtagattttgaatcaaaactcagtctttttaatttttttgtagtctataaactagtttcattatgatggacttgattagtccaaagttaattttagaaattgtcaggtagcatagtgtcttcccatgatcaggaggctttctgaaggactgagtctgtaaatgaaaaaataatttatgtatgaatagcatgtatttctgaagagcttagagtgcctcgtagaatttttctcaattttattcttgaggtttataatttgggggccaaatagatagagctcatcattttcttgtttggaagttgaggctgcgacatgtccaaggttatgaagtctcttttgggaagaacagaaaccaggtctccaaatctggactcatggtttgttcagatgtgtctggacaaatggttgtcaatgttttgtcctgttttttcaaaggaactgttcttcctttgggacaaccttttggtgtttgggaaagtaataagatcttggatttttcaaattaacattaagttgtaagaactaaaattttctttgaaccacactactgtgtaattcactgataattgacatattggctgggcagcctatctcttccatatccagcgtaaatgaataggaggtgtctgtgattttttttttctccctttatttaacattgagtcctagtagtttggagaattagggtccctctaccttctttctgctcttgtcttagtaagatacataaggtacatcatcttgtgtctgtgtgtatatagcagtaggtcaagtttagagtactaaagtctgtaaataaggaatgactattagcatattcattagaattgtttattcttgccagtataaacatcattttatttagactaaagtccctgaagcttgtctttcttattgctttccagtaaatagataatgtgctcgagtaagtttgtgaattgctgattgcaacttaattcagggaccagtcttcaatctatatttcattagaatgattgtccctggaatgatcatacatggactgtcttaagctagcaaaatgttcatactttacactgactaaatgggtcctaaatgatgacattggtctttagacattaacatgtgtatatttttatattagctcaagctaaggttcagaattgaagcttgatattgactagaatagctaaaagtcaaaatgaggtgaggacactggtcttggaaggtagagaaaaataaatgtcttaccaggtgttaatggtatccccagttcttagacttttgtcttctcaggcaattttcatctcaagatctgatgagaagggcatattacattggtatgcaggatgattattgcatattttgtgggacctctaatttccctggtcatctttcagaatattctgttctgccacccccagagagtaaacacttgagccgatttcttcttccccagctattctttcctgggggtaattatgctttgtctttagattagagaagcatcaagcaatagcaatggtgctgtgtccttcggcctaaattcaatagatctcatctcctagggcttccttttcacttggctcaaaggatccattgtattttggcacaaagagcctggccagggtcatgtagccatagctcttagggatgatacctcaagaaattagctgggacccatcactctgtgaaacttcacattttaagaactgagttgagggggttgttatgcacttctgtaacttgaggctaagcaaggggttaactcttgtgagagccaatagagtgtgtctgtattcgcagtccatggctcattttctttatagtaggcatatggatcttcccctctgactttgaatatcatttggtgtggcctgtgggttattttcattctttaccaccaaataaagcggcttattagctactcagttacttgctactcaaaggttaggtcttccctgttcctgcttggcagtgttaaagcttacagggttaacttatgatgattctcctggctcattttcatcagaggcatgatgactggaaagggatcacatgggtcgttggtggtgacacctcactgtttcctaggtttggatagagagatgtatacaagacctttcctgttaaattacgtgactacagagacttgccaggacaaaatttcctaagaaatcagaaaaatgattaagtgagataagtacctgggtgacacagatattagcccgttggtaaaagacaacaaatattagcttaaaatctgcatatgtagaatcattttcattagatttagagcttgaagcaccttggctctcagctactttaaactcctccccatataaatcagggcaccaataaataagtttcagctttttaaaccctggtttgatgttaagcattataaagtacgaagtttgttaccacagtagagataatttagtagaaaaatgctttgaggcttcagtatttgtaagattttgcattagccagatgctaggttgttgaaggcatttcagtgttgataatagcctgagcagacttctttacaaatgggatctgtttctatatgtgtatatgcccacttaccattcagagagactggtctttctctttgtctcccttcacattgctgtgtcagtcctacacctagtcttttcagcacttagcaaattcaaatttggattttttggtcagcttagttcactttaaggcatattggcatggtgtgtgaaagtgatgtttggccccagtattgaggacttttagatccaaataatgactcattaaatataattatgttttaagtatactgaatttctgttagcttaaaatgttaatcctcaggaatgatttcctcacactttgtgttggctaataataaaagcactgttttatcctcaaaactcctttttcaaaaattagggagagagcagtagtgatcatttatgtgagcccctttgaaatgatggtgtcagagtgcagagaaacaatggagttttgatgccaaaaaggtttttttgcagtaaaagtaaaaatttggaattagttggcatataaaggaacccttttgtactggaacgtatgaggctggattgtgaaaaggtaatctttcgattgctagacttggttaacttagggctgcaaatctttttcttctatcaaggtcacttaatatggaatgtttttgtcagactgtcctttgttggaatactttagctgttcagctactttgactcctaggagagaatttagttaaggttcaaagtaattaactggctttgccagtggtgagtcccacaccattattcacttagtagtcatataaatgtttttatttactctcttcaatgctgagaataaggctttaaattactgattcacctttaaaggaatgttgtgagaattgatgtaatttctgtttctgtttccatctaaacttctttataaaaagagggattagtttttttgttttggggtaagcacctaatttatccagtaaccaacaaccctaaccattggcatatatagtctttcactcagaaataaacaaaaactgtttggtatatctgtatcattgctaatcttgtgcactttactttttgggcagtaccatacatagtctgaggctattgacttaaaccaataactgtactttatgtaatgactcttaaatttggttacctgggttcacagcttgcttgaagagaaaggatgctagaataaagtaagcagctgaagagcgagcaaatcaagacaaaacacagtggtctcagatttttcgtagtgtgggaacagtggttttgctctataccactgaaaagcactataacataattgttgtccatgatactgaagcttttcccctcacttctaggttgtttacattcagagctctatcaataagaggaatacatattacagtgaattcgacaaccgcacaagttggcagtaggtatccccaacctaatttatcttggtaaattcaccctgtttcctagtgctgctggataaaagagtgtttactttttattgctcttagacagagtagtctagataagttttcaatttatcaacatagcctagacttctgtaagtggaatgttcattagtaactcatctttttgttgttataattggaaacagaaacgaggcttattgctattgcagaaatcccaaactggcaaaggccagtatatatggtattccataatataaccagcttttgaaatttatgtgtttggattagtgccttctggttaccagtattgactctgctagtttgcacctttccgttcttaacagaaaatttgtatttgttattcctcttaaattttgtcgtaactagtgaaggaagtaaaaaaaaaaaaaaaaacatgcattacattgacatactttatgtgcagcctttatttaggttcagtgaaaccaggtagttctgtatttgtgttgtagcctaaatgttgtttcttttatatccattaaaaacttaaagttacttatgttctgtgatcttaattttgttgtgtttccattgtaggttgataggtatatcgagaacaggtacgtgacaacagtttatattccatgatagaaagctaaagtccatagaaagcacaaaatcgtgttcacacattagtgtacccacacatagaaagcacaagactaatagtattctctgtatcccacaagtgccagtcataaaggccaccaggtatttgtctcagagttgctatgagcactacagtattgataagcccaagacaatgcggtatctaaactggtcctaatggtaagggacccaaaggaataatctcaataagtttgtaccacattgatggagggagagaatacaaatgtcaagaatgccaaaattatatttgggggttactagctaaaatggggtttgagggctttttactgcaacttgaaactggagaaatagggacagatgtctaggtttttggtgggtggaacaggtgacatatttctgttttaagctgtagtgtgattggggttttttgtaaaaaatcttaaatcttttaggaaatattacctcttaacagtgcccccccaaacatgcagaaagtcatactttaacagggcaaatactacttgtctttgattttttttgtgtacgtttgtatgtgagagatgaagttacctttatttttttcctatacttgactgtgcttcattttaataaaggataatttgatctga

SEQ ID NO: 1798 - protein, 718 aa, Homo sapien
MRAVLDTADIAIVALYFILVMCIGFFAMWKSNRSTVSGYFLAGRSMTWVTIGASLFVSNIGSEHFIGLAGSGAASGFAVGAWEFNALLLLQLLGWVFIPIYIRSGVYTMPEYLSKRFGGHRIQVYFAALSLILYIFTKLSVDLYSGALFIQESLGWNLYVSVILLIGMTALLTVTGGLVAVIYTDTLQALLMIIGALTLMIISIMEIGGFEEVKRRYMLASPDVTSILLTYNLSNTNSCNVSPKKEALKMLRNPTDEDVPWPGFILGQTPASVWYWCADQVIVQRVLAAKNIAHAKGSTLMAGFLKLLPMFIIVVPGMISRILFTDDIACINPEHCMLVCGSRAGCSNIAYPRLVMKLVPVGLRGLMMAVMIAALMSDLDSIFNSASTIFTLDVYKLIRKSASSRELMIVGRIFVAFMVVISIAWVPIIVEMQGGQMYLYIQEVADYLTPPVAALFLLAIFWKRCNEQGAFYGGMAGFVLGAVRLILAFAYRAPECDQPDNRPGFIKDIHYMYVATGLFWVTGLITVIVSLLTPPPTKEQIRTTTFWSKKNLVVKENCSPKEEPYQMQEKSILRCSENNETINHIIPNGKSEDSIKGLQPEDVNLLVTCREEGNPVASLGHSEAETPVDAYSNGQAALMGEKERKKETDDGGRYWKFIDWFCGFKSKSLSKRSLRDLMEEEAVCLQMLEETRQVKVILNIGLFAVCSLGIFMFVYFSL

SEQ ID NO: 1799 - DNA, 934 bp, Homo sapien
ggggggcggcatccgggacggcgggcgggctggccaccacgggacaggaaggcacagagcatggagaatgatgaacttccgtcagcggatgggatggattggagtgggattgtatctgttagccagtgcagcagcattttactatgtttttgaaatcagtgagacttacaacaggctggccttggaacacattcaacagcaccctgaggagccccttgaaggaaccacatggacacactccttgaaagctcaattactctccttgcctttttgggtgtggacagttatttttctggtaccttacttacagatgtttttgttcctatactcttgtacaagagctgatcccaaaacagtgggctactgtatcatccctatatgcttggcagttatttgcaatcgccaccaggcatttgtcaaggcttctaatcagatcagcagactacaactgattgacacgtaaaaccagtcaccgttttttccctacgattacaaaactgccagtcctatatggagtctgatcacaagactgcagtttcttcacagatctcaggaagttgtcgtggggcagaggctttttaaaaacatgtgattagggagctatctttatctgaataataacgaatttttaggtaaaacctgagatagagtactacaaaatcatgttgatgacttcagattttggaagttaaatcatgtctgttatttgcattctttagaaacttgactaagtacctgaattcatatttctattctactgtgcaacatagtgatgattcagaaatttttcctttggggaaaaaaatgaatatgaacatttccattgtgttaagtgtaaaaaggtccagacatgatcataaaatttaaattttatacaattaaaaaaaaaaaaaaaaaaaaaaaaaaaaaaaaaaaaaaaaaaaaaaaaaaaaaa

SEQ ID NO: 1800 - protein, 153 aa, Homo sapien
GGGIRDGGRAGHHGTGRHRAWRMMNFRQRMGWIGVGLYLLASAAAFYYVFEISETYNRLALEHIQQHPEEPLEGTTWTHSLKAQLLSLPFWVWTVIFLVPYLQMFLFLYSCTRADPKTVGYCIIPICLAVICNRHQAFVKASNQISRLQLIDT

SEQ ID NO: 1801 - DNA, 2849 bp, Homo sapien
cacattaatttattcctcttcctcttataggtttcatccaaagaatatcaaaaggaggcctaattaaaaccaaaagaaaaagaaagaagcagagagtgaaaatagcatatgaagaaatttttgttaaaaatatgtgaatttgttatagcaatgtaacattaattctactaaatattttatatgaaatgtttcactatgattttctatttttcttctaaaatgcttttaattaatatgttcattaaattttctatgcttattgtacttgttatcaacacgtttgtatcagagttgcttttctaatcttgttaaattgcttattctaggtctgtaatttattaactggctactgggaaattacttattttctggatctatctgtattttcatttaactacaaattatcatactaccggctacatcaaatcagtcctttgattccatttggtgaccatctgtttgagaatatgatcatgtaaatgattatctcctttatagcctgtaaccagattaaggaatacagctcttaaaaaatcaagaacttcctgagtttcacatataaaatggtgacaaacacctgcttctgataaagtttatccaattttgtatttatagaattctattatgtgcttccctccttagacatagtttttctccttttgtactaaccagtacttccatctatattgagctaaactgtctttgaacagtcaactctgcatcatgtgcctgcctgatttggattggtttcactttttttttgtttgaccatagcccattctatcagtcaagatgactgaataattgtgtgttaaatacaactcatgataaggagaacctttatggaaacaagaagttttatggaaatcgagagagaattatttatatgtacttcttaatactatgcttcccaatattttttcttactaaaaataacaaaaatatttaaaccttctgaaatctattcagttatcattaggatttgcacacaatgcaactaataattcatgctttaaaaagtaggttatttctgttgaagagaaaattatcagcagggaagagtctactagaaaattcatgtgctagtcattcttggggatttaatattttgctggagttaattcactatatccagacctgtatctttcatttattgctgagccatgtgcagtctggcatctcaacaacctcaacaacctcaacaacctccaagacatgtcagtttctgtagtgttcacctcaaatctgacactggaattggaactgatttagaaacaaccatttcattcatttggtatgactagcttcatgactagcttcatgaatagcttcatgaatagcttcatgacttctcgctaacaatgatagtataattctgcctgttcttcaggattgaaattttgaactcaatttagatttcctgttttccctcatataccacatctaaacagtctccaaatctttatgctttttttttttttttcaaaaagttcacccaatccctaggctttttacttttttctttttcttttcttttttcttgtttttttttttttcattttgttttgttttgttatgtttttttagacagggtcccactctgtcacccaggctggagtgcagtggtgcaatcacaggtcactgaaacctcccacctagctgggactagaggtgcaggccaccacaccagctaatttatgtaatttttgtagagacgagtttcaccacgttacctaggcttgtcttgaacacctgggctcaagcaatcttccagccccagcctcccaaagtgctgggattacaggtataaaccacaatgcccccgtttttactctttactgcatccttcccatcagtattaattcctcagaaatttagtacattcctccaccatttcaaaatgctcccagaactcacactagttggtacttaactacaaccttcaacctcaccatttaattttgatgtatgtttttggatttaccaacagtactttctttcatgactactttgatttagttaagaatgctcactgtacactgaatgttaattactcagctaattcacactgatttcctgtttaaaaatatgatcccctccaggccattcatgtgaagtcagggtacactgatgccagctacagaatcactatgtttcaatatggaatatgaaaagtcctaacacataattgcaaatcattttctactatggtatacaaattttatcattacaaaatagtatcagcttttttcacttaaggaaaataatacatcttcattcaaatattcagtgcataaataattgccttaaattgagtctttgctgtggaatttgagagttttggaaatcaaaggcccttgtgaaacatttcctgttgccatttatttatagatagcaatagcttcaaatgagtgggaaagtctacttaggtgaagtggtaaatagtcactaagattgtataaatagcgcattgatgagttgcctaattgttttctccaacaataaccactggtccattggttcactacttactcaagaaagacatatactgagattgcttgaaatgtttaatgcatgtgaacgttatttttaccgtgttttggaaaaagatcttgatgttattgtcttcctttattttccacaattaagtgcatctaactgtgaattgtatatggaattacattattcagcatatacactatatttacctgctttgttcattctctgtattcaaaattaacagatcatgctgaaaaccactcaaacgattatattttttacattataagaagtaaaatatattattctgaataatgaaacctggctgttgtactcgtaaagattttagt

SEQ ID NO: 1802 - DNA, 330 bp, Homo sapien
cttgaagtctactctgatgggatctcagatcctttgtcactgcctatagacttgtagctgctgtctctctttgtccctgcagagaatcacgtcctggaactgcatgttcttgcgactcttgggacttcatcttaacttctcgctgccccagccatgttttcaaccatggcatccctcccccaattagttccctgtcatcctcgtcaaccttctctgtaagtgcctggtaagcttgcccttgcttaagaactcaaaacatagctgtgctctatttttttgttgttgttgtgactgacagcctgggggacaagagtgaatctgtgtctcacc

SEQ ID NO: 1803 - protein, 18 aa, Homo sapien
LEVYSDGISDPLSLPIDL

SEQ ID NO: 1804 - DNA, 5446 bp, Homo sapien
cttttaaggagttcttggacctgctgggggacacgatcacactgcaggatttcaaaggtttccgaggaggcctggacgtgacccacggacagacaggggtggaatcagtgtacacaacattccgggacagggagatcatgtttcacgtttccacaaagctgccatttaccgacggagacgcccagcagctccagagaaagagacacattggaaatgacatcgtggccatcatcttccaagaggaaaacacgccgtttgtcccagacatgatagcctccaatttcttacatgcctacatcgtcgtgcaggtcgagaccccaggcacagagaccccatcctacaaggtctctgtcactgcgcgggaagatgtgcccacctttggtccacctctgcccagtccccccgttttccagaagggcccggaattcagggagtttctgctcaccaagctcaccaatgccgagaacgcctgctgcaagtcggacaagtttgcaaagctggaggaccggaccagggctgccctcctggacaaccttcacgatgagctccacgcccacacacaggccatgctgggactgggcccagaggaggacaagtttgagaatggaggccacggggggttcctggagtcttttaagagggccatccgcgtacgcagccactccatggagaccatggtgggcggccagaagaagtcgcacagtgggggcatccctggcagcctcagcgggggcatctcccacaacagcatggaggtcaccaagaccaccttctcgcctccagtggtggcggcaacggtgaagaaccagtcacggagtcccatcaagcgacgctcggggctcttcccccgcctgcacacgggctcagaaggccagggcgacagccgggcacgatgtgacagcacatccagcacacccaagaccccagatggtggacactcctctcaggagataaagtctgagacctcatccaatcccagctctccagaaatctgccccaacaaggagaagcccttcatgaagttgaaggaaaacggccgcgccatctcccgctcctcctccagcaccagcagcgtcagcagcactgcaggggagggcgaggccatggaggagggcgacagtgggggcagccagccgtccacgacctcacccttcaagcaggaggtgtttgtctacagcccgtccccgagcagcgagagccccagcctgggggcagctgccaccccaatcatcatgagccggagtcccacagatgccaaaagcagaaactccccgagatcgaacctgaaattccgctttgacaagctcagccatgccagctctggtgcgggtcactaatgtgaaagtggagtccttcgcctgtccaagggaatcccctcttctgtcctggaaaaggctcctgacctcccagtgtgatgtccgggtcctttatcatcctattcatcctggagaggaaaagtgtcgggcaaagggggatctggggggagctcagcagtgactggggagctggtctgcctcagagacagagtagggggtgggagcagagcctcggtgagggtcttggccacagggcagtgccttcctgaacgtggcaggctttactaccaggaacgcactcggtggtggaggccccatgttcccaggagccaagattcgtagcatccttgaggccatcctgataaaattcggcgctattgcccccgtagctctggagctctaaaccgtctatctgcttctgtgctgaacgcctttcccatctgctgacgtaggcccagggctgccctgcccctgctgccagtgtaccgtgagcggggctccagccagttcaagctcagagccagagctggacgggccagaactgcgctgcacacttcctggactgaggcggggactttgggtcccacccggtttctcctgattatggctgctgtggggtgaggggagggaggggcagccccgaggcagtctcttccctttgagaagatattttcccacaaaggggtgggaagccaggagtgagaaggaattcagggagagcaaaggagccagtgctgagatgctgctgtgttggttgaggaaaacctcgggcctgagggccaggccggagcccaggtctctgctgacaatgggggttcaaggaagacgtcgttatctcccctccccacttactcgaggagagaggtgagggggggatgacttgcgggttctgatcaggcccctgggtggggaaggggcacagtgtccctcagcagcttacgcccctggagtcttggggggcccagcctggccctggggccttttccagctactgtgcccttgggcagctgcgtctggggctcaaccccccaatcctgttcccctctccagctgcgggtctgtaggcagctgtcacatctgaagggtttctgcaacctggaccccatctgggtgtgggtcagaccctgtgacccacatgccacccccaccctccacagagcccccttgctgggacagccagctcacctccaaggacatcccctcctggcttctcccccttccgagtctgcagcgccgtgggcttctctgccgatgggcccgggttggggttaaggtgggcatcctccaggtacaacgagcctgaagagcccctttcagtgcagacggggctgcagagtgacactggctgggcacctgccccacgaccaatgacaaggatttccagctgaatgctttattcccatagggatctggacctgtgcccaagatataaatactacactttttttttttttttttttttaactgacattgtgaaattctccctatagcttttgccattcaagcaacattgtgatctttcttccccgccacgtgtgtgggaatgattgagtcctgtttgcaagctggagaggagctctcccttcgctagtactttctctaaagtactagtctagtaaaatttattcttgttagaaggtcaacaaaatatctgtttagcttttatgaagagtcaccgtagcagcccccacggctggaaagaggcccgtacgttctggacgcgttttgttggctgggcttctggaggcactggcaaggtcaaactgcatttctttaagaacagttgcaggatctggcttgcctctgtgggaagccggcattacaggtgcttggtggatgggccgtgtcacattgccatctggggtcctttggggtttccaggttgtcagcatgctgtcccatttgggaatcccatacctgcctgtccccactgcgctggctgacccttgctgcctgctgcctcttgggagggctttgtccctgcctctgagctggtgggcaggatggctgggtggcccccagagaagcacagacctgggatggggtctccatgcccggtttgctgttggaatgatctgaacaggaccccaaatgcctcttccctctggtcatgcctcactatctctaggagctccatcctgtggcttccagagtgtgcacttccagcccacccgggcagtgctgagagggaggaggagaacaaggatggcccagcctcccctccctcccctagaccacggggcgggcagctcgggttcctggagggctgtttcccccacgctgtccctacatctgctctgatctaaaatgtctttccttttatgctgcgcccagtcttggggctcaaagatttgcccaaacctcattggccctcgtgactaggctcatctagatggtgctcacgctggtgtttgaggcatttccactgtgatctccacgaggggatgttttccgggacacatctctggctctgggaactgcctgactcactgaagaaactacttttcaggcactgtagggtcacccatatgcctccagctcagttgacgcttaaaaacaggtgcagaaaagctcgcgatggaaggtcttaatgagagtgtctgtctatgccagtcatgtaaaatgacgtttcttgaaaaagattcagtggttcagctttgtcagcatcatctcaacacaagcctgctggctctttttagcatctcatccaaccatgtcatcgtccagatgagaaatcttagcccaggtgaggggaataacttgcttgaggtcacacagctggctgttggcaaagctgggattagaaccctcaacccagggtcccttcctctgcagcgcctacatggttggttgaataagtggctgcgtttcctggggccctgggttttggggaagccagttagctgctgctttggcactggcatggaggtgagcagtcaaggatgctggtgaggccgcagtttctgctctttttcatcaggggggatagtctctaggatttttcagtgaggacccttgggctttggatgcagcttgaaccaagaaaacgaggagggaaagggattcagtgaactattcctcagtgggatcggttcttcagctcctgatgggggctgtgtaatgggggcagaggccagggaaaaagatgctgttcacccaccctcagcttcccttttcctaaattaagaggaaaagtggtcaaagaaaaactcttcatttctccctgattcttaagcgaaggtggttaatagaaactcaggctcccgtgacaaggcaggacaagagcctgtttcgctttcctccctgaccctgccaggtgccaactcaaacactacctttctcattggtttctaagtcagtagagacagatctgttttaagcagttgggggttcgagtagatctcatgggtacaggaggccagcagggaccaggccagtcagccatgctcaggacccctcggctcctcccccagcctctagctaccctgtatcgaggcaaggggaggccagtaaagtttgccaagcctgatcctgcagcctggtggggctggctggggtattcttttaccaaactctgttttaccgccagccccttgtacaccccaatcccatgtctccctcccttcagctggaccgtgtgcccctttgggaggaagaagacaagccccactagggccaagggcagcagagccctgccgagtgagaggctgtggggcagcggctctgtcctgtgccttaccagccctggggagggggacatttggctggaagactggaatttaattgccatcgtctttgattttgtgacatttctgcttggaagtgtgaactaccctcccccccccgcttcctgctccttagcatgcgtgcagctctctcctgttttgggtgttccccttggacactccagctcggggactgctggcgtgtgaatgtgcagattcccctgtgtggtcgaacctaagaactgtggcttggaagtgatgctccatgtgacgacgactttgctttctttcctcttagtgaggaggtgattcgtagatcccaactgcctatgtaatgtaaataatgtacatttaatttattgctatggtagcacattgtatttgttaatgtacaaaacaaattct

SEQ ID NO: 1805 - protein, 444 aa, Homo sapien
FKEFLDLLGDTITLQDFKGFRGGLDVTHGQTGVESVYTTFRDREIMFHVSTKLPFTDGDAQQLQRKRHIGNDIVAIIFQEENTPFVPDMIASNFLHAYIVVQVETPGTETPSYKVSVTAREDVPTFGPPLPSPPVFQKGPEFREFLLTKLTNAENACCKSDKFAKLEDRTRAALLDNLHDELHAHTQAMLGLGPEEDKFENGGHGGFLESFKRAIRVRSHSMETMVGGQKKSHSGGIPGSLSGGISHNSMEVTKTTFSPPVVAATVKNQSRSPIKRRSGLFPRLHTGSEGQGDSRARCDSTSSTPKTPDGGHSSQEIKSETSSNPSSPEICPNKEKPFMKLKENGRAISRSSSSTSSVSSTAGEGEAMEEGDSGGSQPSTTSPFKQEVFVYSPSPSSESPSLGAAATPIIMSRSPTDAKSRNSPRSNLKFRFDKLSHASSGAGH

SEQ ID NO: 1806 - DNA, 2815 bp, Homo sapien
gaattcggcacgagctcttctcccctgattcaagactcctctgctttggactgaagcactgcaggagtttgtgaccaagaacttcaagagtcaagacagaaggaagccaagggagcagtgcaatggatttctcagtaaaggtagacatagagaaggaggtgacctgccccatctgcctggagctcctgacagaacctctgagcctagattgtggccacagcttctgccaagcctgcatcactgcaaagatcaaggagtcagtgatcatctcaagaggggaaagcagctgtcctgtgtgtcagaccagattccagcctgggaacctccgacctaatcggcatctggccaacatagttgagagagtcaaagaggtcaagatgagcccacaggaggggcagaagagagatgtctgtgagcaccatggaaaaaaactccagatcttctgtaaggaggatggaaaagtcatttgctgggtttgtgaactgtctcaggaacaccaaggtcaccaaacattccgcataaacgaggtggtcaaggaatgtcaggaaaagctgcaggtagccctgcagaggctgataaaggaggatcaagaggctgagaagctggaagatgacatcagacaagagagaaccgcctggaagatcgagagacagaagattctgaaagggttcaatgaaatgagagtcatcttggacaatgaggagcagagagagctgcaaaagctggaggaaggtgaggtgaatgtgctggacaacctggcagcagctacagaccagctggtccagcagaggcaggatgccagcacgctcatctcagatctccagcggaggttgacgggatcgtcagtagagatgctgcaggatgtgattgacgtcatgaaaaggagtgaaagctggacattgaagaagccaaaatctgtttccaagaaactaaagagtgtattccgagtaccagatctgagtgggatgctgcaagttcttaaagagctgacagatgtccagtactactgggtggacgtgatgctgaatccaggcagtgccacttcgaatgttgctatttctgtggatcagagacaagtgaaaactgtacgcacctgcacatttaagaattcaaatccatgtgatttttctgcttttggtgtcttcggctgccaatatttctcttcggggaaatattactgggaagtagatgtgtctggaaagattgcctggatcctgggcgtacacagtaaaataagtagtctgaataaaaggaagagctctgggtttgcttttgatccaagtgtaaattattcaaaagtttactccagatatagacctcaatatggctactgggttataggattacagaatacatgtgaatataatgcttttgaggactcctcctcttctgatcccaaggttttgactctctttatggctgtgctccctgtcgtattggggttttcctagactatgaggcaggcattgtctcatttttcaatgtcacaaaccacggagcactcatctacaagttctctggatgtcgcttttctcgacctgcttatccgtatttcaatccttggaactgcctagtccccatgactgtgtgcccaccgagctcctgagtgttctcattcctttacccacttctgcatagtagcccttgtgctgagactcagattctgcacctgagttcatctctactgagaccatctcttcctttctttccccttcttttacttagaatgtctttgtattcatttgctagggcttccatagcaaagcatcatagattgctgatttaaactgtaattgtattgccgtactgtgggctggaaatcccaaatctagattccagcagagttggttctttctgaggtctgcaaggaagggctctgttccatgcctctctccttggcttgtagaaggcatcttgtccctatgactcttcacattgtctttatgtacatctctgtgcccaagttttccctttttattaagacaccagtcatactggctcagggcccaccgctaatgccttaatgaaatcattttaacattatattctctacaaagaccttatttccaaataagataatatttggaggtattgggaataaaatttgaggaaggcacgatttcactcataacaatcttaccctttcttgcaagagatgcttgtacattattttcctaataccttggtttcactagtagtaaacattattattttttttatatttgcaaaggaaacatatctaatccttcctatagaaagaacagtattgctgtaattccttttcttttcttcctcatttcctctgccccttaaaagattgaagaaagagaaacttgtcaactcatatccacgttatctagcaaaagtcataagaatctatcactaagtaatgtatccttcagaatgtgttggtttaccagtgacaccccatattcatcacaaaattaaagcaagaagtccatagtaatttatttgctaatagtggatttttaatgctcagagtttctgaggtcaaattttatcttttcacttacaagctctatgatcttaaataatttacttaatgtattttggtgtattttcctcaaattaatattggtgttcaagactatatctaattcctctgatcactttgagaaacaaacttttattaaatgtaaggcacttttctatgaattttaaatataaaaataaatattgttctgattattactgaaaagatgtcagccatttcaatgtcttgggaaacaattttttgtttttgttctgttttctttttgcttcaataaaacaatagctggctctaaaaaaaaaa

SEQ ID NO: 1807 - protein, 442 aa, Homo sapien
MDFSVKVDIEKEVTCPICLELLTEPLSLDCGHSFCQACITAKIKESVIISRGESSCPVCQTRFQPGNLRPNRHLANIVERVKEVKMSPQEGQKRDVCEHHGKKLQIFCKEDGKVICWVCELSQEHQGHQTFRINEVVKECQEKLQVALQRLIKEDQEAEKLEDDIRQERTAWKIERQKILKGFNEMRVILDNEEQRELQKLEEGEVNVLDNLAAATDQLVQQRQDASTLISDLQRRLTGSSVEMLQDVIDVMKRSESWTLKKPKSVSKKLKSVFRVPDLSGMLQVLKELTDVQYYWVDVMLNPGSATSNVAISVDQRQVKTVRTCTFKNSNPCDFSAFGVFGCQYFSSGKYYWEVDVSGKIAWILGVHSKISSLNKRKSSGFAFDPSVNYSKVYSRYRPQYGYWVIGLQNTCEYNAFEDSSSSDPKVLTLFMAVLPVVLGFS

SEQ ID NO: 1808 - DNA, 1797 bp, Homo sapien
ccggcgccgggggcggcggggaaccccaaacgcaaccgggtctggagggatccccgcgccgagccagccgccgtcaccgcctccgcgccgcccctgcgggcttggcaggcgcccggcgcgcccgcactgcgcccggccgccggctcccgcggtcccaccgtgagctcgccggcccgtcgcccgctcgccatgcaaccgccgccggcctcgcgcgcgtaggcgcccgccgcaggccatgctgcccctgctcgccgcgctcctggccgccgcctgcccgctgccgcccgtccgcggcggggccgcggacgcgcccggcctcctcggggtgccctccaatgcttcagtcaacgcgtcctccgcggacgagcccatcgccccgcggctgctggcctcggcggcccccgggccccccgagcgcccgggcccggaggagacggcggcggcagcggcgccgtgcaacatcagcgtgcagcggcagatgctgagctcgctgctcgtgcgctggggccgcccgcggggcttccagtgcgacctactgctcttctccaccaacgcgcacggccgcgctttcttcgccgccgccttccaccgcgtcgggccgccgctgctcatcgagcacctggggctggcggcgggcggcgcgcagcaggacctgcgcctctgcgtgggctgcggctgggtgcgcggtcgccgcactggccgcctccggcccgccgccgcccccagcgccgccgccgccaccgccggggcgcccaccgcgctgccagcctaccccgcggccgagccgcccgggccgctgtggctgcagggcgagccgctgcatttctgctgcctagacttcagcctggaggagctgcagggcgagccgggctggcggctgaaccgtaagcccattgagtccacgctggtggcctgcttcatgaccctggtcatcgtggtgtggagcgtggccgccctcatctggccggtgcccatcatcgccggcttcctgcccaacggcatggaacagcgccggaccaccgccagcaccaccgcagccacccccgccgcagtgcccgcagggaccaccgcagccgccgccgccgccgccgctgccgccgccgccgcggccgtcacttcgggggtggcgaccaagtgacccgctccgctcctccctgtgtccgtcctgtgtccgcgcgcgcgggtgcctttcccgccggggactcggccggtgtgcttcgtgctgtagttatcgttagttcctcttcccgagatggggccgccgagagaccccagcgcctttgaaaagcaaggtttgtgctgcgcttccagttccgaaaagcagatgtttaagcccttggactgagggtgggatcgcagctccgaagacggagaggagggaaatggggccctttcccctctattgcatccccctgcccgactccttccccgcacccacgtgccctagattcatggcagaaaatgaccaaatcctgtgtatttgttttatatatttaataactgttttaaatgaaagttttagtaaaaaaaatacaaaacaaaaagattaaattgctattgctgtagtaagagaagctctttgtatctgaacatagttgtatttgaaatttgtggttttttaatttatttaaaattggggggagggcatgggaaggatttaacaccgatatattgttaccgctgaaaatgaactttatgaaccttttccaagttgatctatccagtgacgtggcctggtgggcgtttcttcttgtacttatgtggttttttggcttttaatacagacattttcctcca

SEQ ID NO: 1809 - protein, 300 aa, Homo sapien
MLPLLAALLAAACPLPPVRGGAADAPGLLGVPSNASVNASSADEPIAPRLLASAAPGPPERPGPEETAAAAAPCNISVQRQMLSSLLVRWGRPRGFQCDLLLFSTNAHGRAFFAAAFHRVGPPLLIEHLGLAAGGAQQDLRLCVGCGWVRGRRTGRLRPAAAPSAAAATAGAPTALPAYPAAEPPGPLWLQGEPLHFCCLDFSLEELQGEPGWRLNRKPIESTLVACFMTLVIVVWSVAALIWPVPIIAGFLPNGMEQRRTTASTTAATPAAVPAGTTAAAAAAAAAAAAAAVTSGVATK

SEQ ID NO: 1810 - DNA, 1320 bp, Homo sapien
catcttgctcagggtggtcctctgggagtctttccccagggctgatgctgggtgccctgccccagtgagatatgtgtgggtggtatctgtaaagaggtttgtcttgcagttgaaggtgggaaaagaaggaagggggggcatgcaatatgggtgagggtagggtattaccttttttttgcagcatttttcggcctctttatttagaacccggcggacgaggggccggggcagtggtacagacggctcaggaaccattttaacagacttgtcttcaagtttcagataaacacagtcataataagagagacagcgaaagcgcgaagagactgcaagctagatgggcatgtatggcagctacagcttgtgagtgacccccttccccagagtccgcgatgaaaataaagttacacttgtcaataaccagatgtgggagatggagagtgcctttggcataaccaataaccgagctagtgcgtggcagagcggtccacgcctggacataaatagaaaatataagttagtataactttaaaaactttttgtacaaatatacatggtttttttattttttccttttttttttcttttttcttttttttgcactgagtttcagcagagattaaacattttatataaatgactcttaaagctttacaccttgggaccagtgtaccttctcgtgcagaatacatttagatataaaaagacgttattaatacattgcacagttttcaaaatttaaaaacaaaaccgaacgctgctctgcggcagccgccgccggttgctgctacatgaacggtcccagccgaggcccagcgcccttccaacgtccgctgccccggcaggttccctcggggctctttgggctctaaattggctcaccgcagcctcttgcgcggggtctgctccaccgagcccacgccaggggcggcgcttggagagggacacggcgcggggacatcgcccgacgacttctcaggcgctgatctcttgcgcttggcgaagaaatctgcaccgactcgcggatagaacgcgggcaccgagtcgactgtccacttcggtccagctgcaggcgtccagggccccgcagcggcatgtcctgctggaagtcgtaatcccagcggttctggtcctcggcgttcagctcggccaggcgggcctgcagctcgcggctcagctcctcgtggtccaccggcccgaagaggctgcggcaggcgctggtgcgcactagtgctgggaaggtcccacgggcgacagacgctccatcgtggatgtgctggctgtccggtggttgactcttctgcgtcgggtcgcctgtct

SEQ ID NO: 1811 - protein, 50 aa, Homo sapien
ILLRVVLWESFPRADAGCPAPVRYVWVVSVKRFVLQLKVGKEGRGGMQYG

SEQ ID NO: 1812 - DNA, 2903 bp, Homo sapien
tgaaggctggttgttcagactgagcttcctgcctgcctgtaccccgccaacagcttcagaagaaggtgactggtggctgcctgaggaataccagtgggcaagagaattagcatttctggagcatctgctgtctgagcagcccctgggtgcgtccactttctgggcacgtgaggttgggccttggccgcctgagcccttgagttggtcacttgaaccttgggaatattgagattatattctcctgccttttaaaaagatggacttcagcagaaatctttatgatattggggaacaactggacagtgaagatctggcctccctcaagttcctgagcctggactacattccgcaaaggaagcaagaacccatcaaggatgccttgatgttattccagagactccaggaaaagagaatgttggaggaaagcaatctgtccttcctgaaggagctgctcttccgaattaatagactggatttgctgattacctacctaaacactagaaaggaggagatggaaagggaacttcagacaccaggcagggctcaaatttctgcctacaggttccacttctgccgcatgagctgggctgaagcaaacagccagtgccagacacagtctgtacctttctggcggagggtcgatcatctattaataagggtcatgctctatcagatttcagaagaagtgagcagatcagaattgaggtcttttaagtttcttttgcaagaggaaatctccaaatgcaaactggatgatgacatgaacctgctggatattttcatagagatggagaagagggtcatcctgggagaaggaaagttggacatcctgaaaagagtctgtgcccaaatcaacaagagcctgctgaagataatcaacgactatgaagaattcagcaaaggggaggagttgtgtggggtaatgacaatctcggactctccaagagaacaggatagtgaatcacagactttggacaaagtttaccaaatgaaaagcaaacctcggggatactgtctgatcatcaacaatcacaattttgcaaaagcacgggagaaagtgcccaaacttcacagcattagggacaggaatggaacacacttggatgcaggggctttgaccacgacctttgaagagcttcattttgagatcaagccccacgatgactgcacagtagagcaaatctatgagattttgaaaatctaccaactcatggaccacagtaacatggactgcttcatctgctgtatcctctcccatggagacaagggcatcatctatggcactgatggacaggaggcccccatctatgagctgacatctcagttcactggtttgaagtgcccttcccttgctggaaaacccaaagtgttttttattcaggcttgtcagggggataactaccagaaaggtatacctgttgagactgattcagaggagcaaccctatttagaaatggatttatcatcacctcaaacgagatatatcccggatgaggctgactttctgctggggatggccactgtgaataactgtgtttcctaccgaaaccctgcagagggaacctggtacatccagtcactttgccagagcctgagagagcgatgtcctcgaggcgatgatattctcaccatcctgactgaagtgaactatgaagtaagcaacaaggatgacaagaaaaacatggggaaacagatgcctcagcctactttcacactaagaaaaaaacttgtcttcccttctgattgatggtgctattttgtttgttttgttttgttttgtttttttgagacagaatctcgctctgtcgcccaggctggagtgcagtggcgtgatctcggctcaccgcaagctccgcctcccgggttcaggccattctcctgcctcagcctcccgagtagctgggactacaggggcccgccaccacacctggctaattttttaaaaatatttttagtagagacagggtttcactgtgttagccagggtggtcttgatctcctgacctcgtgatccacccacctcggcctcccaaagtgctgggattacaggcgtgagccaccgcgcctggccgatggtactatttagatataacactatgtttatttactaattttctagattttctactttattaattgttttgcacttttttataagagctaaagttaaataggatattaacaacaataacactgtctcctttctcttacgcttaaggctttgggaatgtttttagctggtggcaataaataccagacacgtacaaaatccagctatgaatatagagggcttatgattcagattgttatctatcaactataagcccactgttaatattctattaactttaattctctttcaaagctaaattccacactaccacattaaaaaaattagaaagtagccacgtatggtggctcatgtctataatcccagcactttgggaggttgaggtgggaggatttgcttgaacccaagaggtccaaggctgcagtgagccatgttcacaccgctgcactcaagcttgggtgacagagcaagaccccgtccccaaaaaaattttttttttaataaacccaaatttgtttgaaaacttttaaaaattcaaatgatttttacaagttttaaataagctctccccaaacttgctttatgccttcttattgcttttatgatatatatatgcttggctaactatatttgctttttgctaacaatgctctggggtctttttatgcatttgcatttgctctttcatctctgcttggattattttaaatcattaggaattaagttatctttaaaatttaagtatcttttttccaaaacattttttaatagaataaaatataatttgatcttaaaaaaaaaaaaaaaaaaaaaaaaaaaaaaaaaaaaaaaa

SEQ ID NO: 1813 - protein, 496 aa, Homo sapien
MDFSRNLYDIGEQLDSEDLASLKFLSLDYIPQRKQEPIKDALMLFQRLQEKRMLEESNLSFLKELLFRINRLDLLITYLNTRKEEMERELQTPGRAQISAYRFHFCRMSWAEANSQCQTQSVPFWRRVDHLLIRVMLYQISEEVSRSELRSFKFLLQEEISKCKLDDDMNLLDIFIEMEKRVILGEGKLDILKRVCAQINKSLLKIINDYEEFSKGEELCGVMTISDSPREQDSESQTLDKVYQMKSKPRGYCLIINNHNFAKAREKVPKLHSIRDRNGTHLDAGALTTTFEELHFEIKPHDDCTVEQIYEILKIYQLMDHSNMDCFICCILSHGDKGIIYGTDGQEAPIYELTSQFTGLKCPSLAGKPKVFFIQACQGDNYQKGIPVETDSEEQPYLEMDLSSPQTRYIPDEADFLLGMATVNNCVSYRNPAEGTWYIQSLCQSLRERCPRGDDILTILTEVNYEVSNKDDKKNMGKQMPQPTFTLRKKLVFPSD

SEQ ID NO: 1814 - DNA, 2107 bp, Homo sapien
atgctcagaatggagcagtggacaaaggagacaaaaatccctgccttcatggaacatgtattctatcagagaaaaaaaattctcaaggaaaaaaggcaattttagcatctgctctgctctgttctctcaaaaaataagcaaaggatttcacagtgttctaggtacttgggaatcatcagtgaacaaaacaaagatcctgcccttgtggaccttatgtgccagaggctcctgaccaccataaagatagaactggggcttaaccctcatcacttctgaagctgatggaatgacaattgcagcatgactttcccagggccctgattttcagcacggatgattttttcttcagggaagatggtgcctatgagttcaatcctgacttcctggaggaagctcatgaatggaaccaaaaaagagcaagaaaagcaatgaggaatggcatatcccccattattattgataataccaacctccacgcctgggaaatgaagccctatgcagtcatggcacttgaaaataactatgaagttatattccgagaacctgacactcgctggaaattcaacgttcaagagttagcaagaagaaacattcatggtgtctcaagagaaaaaatccaccgaatgaaagaacggtatgaacacgatgttacttttcacagtgtgcttcatgcagaaaagccaagcagaatgaacagaaaccaggacaggaataatgcattgccttccaacaatgccagatactggaattcctacacagagtttccaaaccggagggcccacggtggatttacaaatgagagctcctatcacagaaggggcggttgtcaccatggatattagaggcctatcttacagccaggcagaattttcctaagtcagtttctacttcagtttttgttattttttgttgcattttagtcagagctccaattccagtgtaaatagctgaactcaaaagtttctgagcaaagtcattatattcactttcttcaccaaaatttgttaaagtgcttctatatgcatggtctgatgctgggaattctgcagatttgagtaaacagtctctttctctagggtaagaatttgaaaccaaaacttgagaacacacccaagaatatatttacataggttcatagatgaaataaagtgtttatattatatataagcttcagtaccatttgctctgaagtgatctatttattttttcaggaaattcatctccatcggtaaagttgggaaggtggagagaagtggtgggggggcattgctacttatcaaagtgccattgctactttgataatctatgtatctaaaaatgtgagatgtgcgactcttatgatactgattttcctttaatgttaatatgccagaaagcatacatctaagggaacattgtccttcaaagtagacactttgggaagttatttctttattttaatgatgtatcattgttaaaaatgctgtcaaatccttaatagctacaggagctactgagggaaatcagtgtcattatttaaagtcacgccttgtgtttttactactttattcagcaggattaaacctgaataacttttggctgttgtgctaatagtgtaaataaaataagcctgccttcataaaacactaacttttaaaaggaataaacgacttctaaaattatgcctattaacatgtgtaattagtcggcagctcaaatgtttgggagtgcaagaaattaggcaccccaggatataggtcatacagggatatataaaagccatgctcattacaaaatgagcagttgatgttttatgtggcattaagacaatcaagtcctcacaactctggaatgtcttcttatactgatgctgaatttatgaatccaaattaatttccaacaggttggaatcagatttaatgtgagatcatgatagacaagaccacagaggacgtatgctctatttcttgttggccaacagcttctttctaatgttctgtgaaaaattattttaagtgtcttatataatggtgcttttatggttattaaaaattgtaaatggtatcacatttatatggatttgtcattggatctttttttggttcaacaataaaaaaatttaattacc

SEQ ID NO: 1815 - protein, 137 aa, Homo sapien
MRNGISPIIIDNTNLHAWEMKPYAVMALENNYEVIFREPDTRWKFNVQELARRNIHGVSREKIHRMKERYEHDVTFHSVLHAEKPSRMNRNQDRNNALPSNNARYWNSYTEFPNRRAHGGFTNESSYHRRGGCHHGY

SEQ ID NO: 1816 - DNA, 2904 bp, Homo sapien
attctgagcatggcgtgctactataataggtctcagcttatggaaagagttttttcccagattaatgacagaattaatggaactacaggaattctatgacccagatacagtggaacttatgacctggataaaaaggcaagctccagttgcagctgtgtttgcagggagtccacagttaatgggtgcgattaaattatgcactggatggatggtgacaagtttgcctctttacaatgatgatgatcttctcaagagaaatgaaaatatctaccaaatctattcaaagcgatctgctgaggatatttataaaatactgacatcttacaaagctaattacctaattgtagaggatgctatctgcaatgaggtgggacccatgagaggctgtagggttaaagatttattagacattgcaaatggccacatggtttgtgaagaaggtgacaagctaacctactcaaaatatgggcgattttgtcatgaggtcaaaattaactattctccatatgtgaattatttcactagagtatactggaacagatcctactttgtatataaaatcaacactgtgatatccttccagtcttgaaaaataacagagccttcatttcaaagactacctgaagtaaaatgcagttttcttctacctactcggtgtcttttgcagatcagagtatggacatttgaaatattgctgcttctttcccccttctgctgttaactggatccagagttctgtgggaaatagaagatcaagcattactgtcctttgattaaatgtgatatctaccactctgcaatattccagacaggtgtcttccttaccgttacatggtctttaacacttttactgattgcaatattttccccataaaatcttcattctattataatattgatcttgaatttgaatatgtgcaaggtcagatacatttctcaaacataacatttaataaataatgtgatataattatttaatagaaagaataattccgaccttcaagcaagtttctgaaggtattttatgatgtataacaactgaagttttacaataaaaactaatttaaatgttagctgaagatatgtggcatttaaattaaaatggaaattatataaaggaaagtgatttttaaggatatacataaagatatatttagaattttcatgatactgttctcctcatctactgcttatgttaagtgagaactttcttagtaatacataatgcatgatgttactgcattttctaaatgactagtaagtgattagttttttcacttatgcctattaatttgataccaatttaatcatgataaaacaataaccgttaacatatattttgttaaatggacatttaaaagaatgttgttcaggttttttttttaaatactgatatggggcatacaatctattcacatgttttctactgaagtactaagtaaaaaaattaaatcattatcagaataaaaatatgtgttctaaaattagcaacaatttctggggatacatgcagatgttgttaaacgtacctctgcatacagatatattataaaacacaagcaatgttatttatgaaactgtgatgcagtcttcaacatcaagaaaaaatgacaactataataaaatttacaacacagtttcacagtctaaatgctatgttcctttaagtattttcatatttttaatcatttattaagagaaaattgtgaaaagttaatttggccttatagagagattcaggatagatgtagcctatagatgtgtcattttaataagttgggatacatgtttagtttttccttatattcctgttcagtgaacagattttcataattctcacttgttaaagtgctgcaaaaattgcattttcagtactctaaattactacattagaagagagcatttctccattgtctttattttctgttatatatgtgttgtaaaagtacactacattagaagggagcttttccgttgtctttattttctgttatacatgtgttgttaaagtacatgcattcttagactaactctcagatgctttgctcttttggagctgaagaattgtttgatggtgatgtcatatatctgatagattagtttcagtggttctcatttcacttttatacgtaatttcttaactatattaagatagttgcaggcagtgtacctcaggttgactctgtacatctgaatagtgagtcactagtattttgcttcaagccttctgaaaatataaccatagttacctaagcacacagtgaatagtcacatggtagtacttgtgattagagcatgtaaaacaatgtaattgaaaagtcagcttccatattttgtaggggaaatagaacaccctactttttatctagtgtgaaatatttaatcgaatttttgttgatttatattatgttacctgtgctgaattaggtttggtacttgtgttttgtttgacatattagtaagttgcttttgcttctttctgtcaacttattttttaaataaaattgatctggaaaaattgttaatgggatgttttaaataatgaatttttcatccagcatcagttgaaaaggaaaagaaagcttcattatggaaatgacaatattgaatatgacagataagtttatttgcttctgttttaactgcagttaatagtactagacaactttaagtggaaagcatttagtttatttcttcacttatttgtagagtgaacaaatgattcacaattctacaagtaattccacttaggtaacttacagttgttaggtttgacaataaagatctactatgagaggagaagaatttatgggttttgggtggaaggaatttctcaaagaaataaaaaatgttctttgcccttgatactgcaaacccactgatacaagtgccttgaatttatta

SEQ ID NO: 1817 - protein, 174 aa, Homo sapien [sequence omitted]

SEQ ID NO: 1818 - DNA, 431 bp, Homo sapien
  Unsure 421: Unknown base
aagctaaataaatatagctttattcatctttcagagattgccatttagcctagaaaattacatcaaaagatgaactgatttttgcttgaaaaagtcaaccatgtttaattgctcacacaattttaattacaacagatgtaatttctaatatataccattcgatcacacaccatttttatgttctggagtgagacctgggagtattttgcttaagactttctcattctctaaaactagctttggcagttaacaatgtggagaattcagcacaaaaagcaccctagcccagcctttttattttatttttttaaatctctatttaacccttcaaagtttcctttgcagccatatgcatttctaggtggctctacctgtagaaggctgcactttccaagcggcgagggactttaattctcacttnccaccactcc

SEQ ID NO: 1819 - DNA, 2306 bp, Homo sapien
ggcacgagggaggtctgcatgaaggggatcccctacatcgcagcctaccagaaggaactggctcattcccagccggcggtgcagccccggctcaagctgctcctgatggggcataaggctgcaggaaagactttgctgcgccactgcctcaccgaggagagagtggagggatgcccaggaggaggggacaaggagaagtgctacccaccgtcacctccccctgtgagcaagggcatcgaggtgaccagctggacggccgatgcctcccggggcctgcggttcatcgtgtatgacttagctggggatgaaagttatgaggtgatccagcccttcttcctgtccccaggggccctatacgtgctggtggtcaacttggccacctatgagcctcgccactttcctaccaccgtgggctccttcttgcatcgggtcggggcgagagtgccccacgcggtggtgtgcatcgtgggcacccacgcagacctgtgcggagagcgtgagctggaggagaaatgtctggacattcaccgccagatcgccctgcaggagaagcacgacgcggagggactgagccgcttggccaaggtggtggacgaggcactggcccgggacttcgagctgcgctctgccagcccccacgcagcctactatggcgtttcggacaagaaccttcgacggcgcaaggcccattttcaatacctgctcaaccaccggctgcagatcctctcccccgtgttgcctgttagctgcagggacccgcgccacttacgacgccttcgggacaagttgctgtcagttgctgagcaccgagagatcttccccaacttacacagagtactgcctcgatcctggcaggtgctggaggaactgcatttccagccacctcaggcccagcgactgtggctaagctggtgggactcggcgcgcttgggcctgcaggcgggtctgaccgaggaccgactgcagagtgccctctcctacctgcatgagagcggcaagctactctactttgaggacagtccggctctcaaggagcacgtcttccacaacctcacccgcctcatcgacatcctcaatgtcttcttccagagggatccctctttgctgctgcataagctgctcctagggaccagtggagagggcaaggcggagggggaaagctccccgcccatggcgcggtccacccccagccaggaactgctccgggccacccagctccatcagtatgtggagggctttctgttgcatgggctcttgccagctcatgtcattcggttgctgcttaagcctcatgtccaggcccagcaggacttgcagctgttgctggagctgctggagaagatgggactctgttactgcctcaataaacccaagggcaagcctttgaatgggtccacagcttggtacaagttcccatgctatgtgcagaacgaggtgccccatgcagaagcctggattaatgggaccaacctagctgggcagtcttttgtggctgagcagttgcagattgaatatagctttccttttacttttccacctgggttgtttgcacgctacagtgtccagatcaacagccatgtggtgcacaggtcggatggtaaatttcagatctttgcctatagagggaaagttcctgtggttgtgagttacagacctgccaggggagtcctgcagccagacaccctgtccattgctagccatgcatcattaccaaatatatggaccgcatggcaagccataacccccttggtggaggaactgaatgtcctacttcaggaatggcctggactgcactacaccgtgcacattctctgttctaagtgccttaagagaggatcgcccaatccacatgcttttccaggggagttgctgagtcagcccagaccggaaggagtggcagagatcatttgccccaagaacggcagcgagcgagtaaatgttgccttggtttacccacccacgccgactgtgatcagcccctgttccaagaagaatgttggtgaaaagcacagaaaccagtgacgtttgtggctgtggaatttccatggagaaaagagagcatctgaacacctggaccatcttttgcacctggcagaccctctgcactcaccccagcgtgttctgtgaacttgagtgacaacgcgtgcttgcagggtgctttttggatgactggggaagaggtggggagggggtggtggggggaagcatggacgagaacatggagcaaatgttttacaacctgaacctcagaactgtgatcctccaaggagcgcgctacttgaagaaaaaaaaaaaaaaaaaaaaaa

SEQ ID NO: 1820 - DNA, 1648 bp, Homo sapien
atgcgggagatcgtgcacatccaggccggccagtgcggcaaccagatcggggccaagttctgggaagtcatcagtgatgagcatggcatcgaccccagcggcaactacgtgggcgactcggacttgcagctggagcggatcagcgtctactacaacgaggcctcttctcacaagtacgtgcctcgagccattctggtggacctggaacccggaaccatggacagtgtccgctcaggggcctttggacatctcttcaggcctgacaatttcatctttggtcagagtggggccggcaacaactgggccaagggtcactacacggagggggcggagctggtggattcggtcctggatgtggtgcggaaggagtgtgaaaactgcgactgcctgcagggcttccagctgacccactcgctggggggggggacgggctccggcatgggcacgttgctcatcagcaaggtgcgtgaggagtatcccgaccgcatcatgaacaccttcagcgtcgtgccctcacccaaggtgtcagacacggtggtggaaccctacaacgccacgctgtccatccaccagctggtggaaaacacggatgaaacctactgcatcgacaacgaggcgctctacgacatctgcttccgcaccctcaagctggccacgcccacctacggggacctcaaccacctggtatcggccaccatgagcggagtcaccacctccttgcgcttcccgggccagctcaacgctgacctgcgcaagctggccgtcaacatggtgcccttcccgcgcctgcacttcttcatgcccggcttcgcccccctcaccaggcggggcagccagcagtaccgggccctgaccgtgcccgagctcacccagcagatgttcgatgccaagaacatgatggccgcctgcgacccgcgccacggccgctacctgacggtggccaccgtgttccggggccgcatgtccatgaaggaggtggacgagcagatgctggccatccagagcaagaacagcagctacttcgtggagtggatccccaacaacgtgaaggtggccgtgtgtgacatcccgccccgcggcctcaagatgtcctccaccttcatcgggaacagcacggccatccaggagctgttcaagcgcatctccgagcagttcacggccatgttccggcgcaaggccttcctgcactggtacacgggcgagggcatggacgagatggagttcaccgaggccgagagcaacatgaacgacctggtgtccgagtaccagcagtaccaggacgccacggccgaggaagagggcgagatgtacgaagacgacgaggaggagtcggaggcccagggccccaagtgaaactgctcgcagctggagtgagaggcaggtggcggccggggccgaagccagcagtgtctaaacccccggagccatcttgctgccgacaccctgctttccccatcgccctagggctcccttgccgccctcctgcagtatttatggcctcgtcctcccccacctaggccacgtgtgagctgctcctgtctctgtcttattgcagctccaggcctgacgttttacggttttgttttttactggtttgtgtttatattttcggggatacttaataaatctattgctgtcagataccctt

SEQ ID NO: 1821 - protein, 450 aa, Homo sapien
MREIVHIQAGQCGNQIGAKFWEVISDEHGIDPSGNYVGDSDLQLERISVYYNEASSHKYVPRAILVDLEPGTMDSVRSGAFGHLFRPDNFIFGQSGAGNNWAKGHYTEGAELVDSVLDVVRKECENCDCLQGFQLTHSLGGGTGSGMGTLLISKVREEYPDRIMNTFSVVPSPKVSDTVVEPYNATLSIHQLVENTDETYCIDNEALYDICFRTLKLATPTYGDLNHLVSATMSGVTTSLRFPGQLNADLRKLAVNMVPFPRLHFFMPGFAPLTRRGSQQYRALTVPELTQQMFDAKNMMAACDPRHGRYLTVATVFRGRMSMKEVDEQMLAIQSKNSSYFVEWIPNNVKVAVCDIPPRGLKMSSTFIGNSTAIQELFKRISEQFTAMFRRKAFLHWYTGEGMDEMEFTEAESNMNDLVSEYQQYQDATAEEEGEMYEDDEEESEAQGPK

SEQ ID NO: 1822 - DNA, 3473 bp, Homo sapien
ggcacgaggcgaggatccgctcgggagcctcccctggccaggagcaggggattagtctgccccgcgaccggccccagccacgacgcggacatcgccccctctgtctgggccgctgtcactcacgcgccaaagggccacggagaaagaaggggcgggccggggcgggccgggcgagcggaggcggggacttgcgccgtcctgaggctgcctcctagggtccggccggcgctggagctgcggatttagattgtcactgccacctcggtcggtgcttacttcgctgccagctggtcgtcgccatgaacccggacctgcgcagggagcgggattccgccagcttcaacccggagctgcttacacacatcctggacggcagccccgagaaaacccggcgccgccgagagatcgagaacatgatcctgaacgacccagacttccagcatgaggacttgaacttcctcactcgcagccagcgttatgaggtggctgtcaggaaaagtgccatcatggtgaagaagatgagggagtttggcatcgctgaccctgatgaaattatgtggtttaaaaattttgtgcaccgagggcggcctgagcctctggatcttcacttgggcatgttcctgcccaccttgcttcaccaggcaactgcggagcagcaggagcgcttcttcatgcccgcctggaacttggagatcattggcacttatgcccagacagagatgggtcatggaactcaccttcgaggcttggaaaccacagccacgtatgaccctgaaacccaggagttcattctcaacagtcctactgtgacctccattaaatggtggcctggtgggcttggaaagacttcaaatcatgcaatagttcttgcccagctcatcactaaggggaaatgctatggattacatgcctttatcgtacctattcgtgaaatcgggacccataagcctttgccaggaattaccgttggtgacatcggccccaaatttggttatgatgagatagacaatggctacctcaaaatggacaaccatcgtattcccagagaaaacatgctgatgaagtatgcccaggtgaagcctgatggcacatacgtgaaaccgctgagtaacaagctgacttacgggaccatggtgtttgtcaggtccttccttgtgggagaagctgctcgggctctgtctaaggcgtgcaccattgccatccgatacagcgctgtgaggcaccagtctgaaatgaagccaggtgaaccagaaccacagattttggattttcaaacccagcagtataaactctttccactcctggccactgcctatgccttccagtttgtgggcgcatacatgaaggagacctatcaccggattaacgaaggcattggtcaaggggacctgagtgaactgcctgagcttcatgccctcaccgctggactgaaggctttcacctcctggactgcaaacactggcattgaagcatgtcggatggcttgtggtgggcatggctattctcattgcagtggtcttccaaatatttatgtcaatttcaccccaagctgtacctttgagggagaaaacactgtcatgatgctccagacggctaggttcctgatgaaaagttatgatcaggtgcactcaggaaagttggtgtgtggcatggtgtcctatttgaacgacctgcccagtcagcgcatccagccacagcaggtagcagtctggccaaccatggtggatatcaacagccccgaaagcctaaccgaagcatataaactccgtgcagccagattagtagaaattgctgcaaaaaaccttcaaaaagaagtgattcacagaaaaagcaaggaggtagcttggaacctaacttctgttgaccttgttcgagcaagtgaggcacattgccactatgtggtagttaagctcttttcagaaaaactcctcaaaattcaagataaagccattcaagctgtcttaaggagtttatgtctgctgtattctctgtatggaatcagtcagaacgcgggggatttccttcaggggagcatcatgacagagcctcagattacacaagtaaaccagcgtgtaaaggagttactcactctgattcgctcagatgctgttgctttggttgatgcatttgattttcaggatgtgacacttggctctgtgcttggccgctatgatgggaatgtgtatgaaaacttgtttgagtgggctaagaactccccactgaacaaagcagaggtccacgaatcttacaagcacctgaagtcactgcagtccaagctctgaagtgtcacaaggacaagtttaatctgcttcagaaagcgcctgtgtgcaactcaaattttgtggaatctttttcgaattcaaatagctatagagcaaatgataaattgacccctttttataaatggagggaaaaaatgaacagatttcagagattaaatgaaaaaaagcagatgttttaagtgcaattaacactgaaagagacctgttaaaccattcagaaaaagcttaagaaatgcgatatgacttccttttgtaatgctgctgatcccagtagactatgacttttgataattagcagaatttaactactgagtagttgattattttcacattttaattgctaatcactggctatataagtgtttttaagcaaaggtatttttgaagtggtgtagaacccttccaagctttcctgctcagtgttctaccagacttaccctggggcctggcttaaaagcaggattgaagaaaagggactgggggaaggaaacttattggaaaacttgatgcgaatgagtttctgcttggcacagtctctgcctgcttgctctcctttgctgatggattgcatttatcaaactattcatgctagcatttttccaacgagggaacttattccgcacgggcctactgtaggaccattgtctcgtgtaattaggaattttccatttgaaggattgctaaattgtcacagtagtaggaagtatagggaaacctctcagctgtggcactgttgtagctttggagtgcagagtgtaactctgggacaatcagatttcacatattctgtcatcttggcataagccattaaaagcttggagattactgtatttggcattaaaaaaaaatgtcacttaggtcagcactcccagacgtagcacagaaaaaccctttgacacaaaccatgtgttctgatttttggttcagaaaatattgaaactgtgagttgttttttttttaacaactgggaaaaaacaaaaacaaaaaactatagttagaaaaatggaagttccataggttctatttcttactctatgtatggctttgttttcagtctatttctaggagctttctctgaatcgctaattgtcctttcagttgaaatctaatttatacaatcattctatacttaaaggttaaatacatcttaattaattttttcttaaaaaaaaaaaaaaaaaaaaaaaaaaa

SEQ ID NO: 1823 - protein, 660 aa, Homo sapien [sequence omitted]

SEQ ID NO: 1824 - DNA, 2760 bp, Homo sapien
ttcatattaaaaaaatagctggtaaatctttctaggtagtaacttatccaaacaatactttgagtatcatattttgtgaatgacttgcttaaactgggaaactgaatattctttttaaatcatataattcctgtattaaatgtgaaacacacagtctccaaagtcacctgattctctgtggaaaatgaaaggcattgaaggaaaccagatacattaatacttagttttggttgaaagtgcaacattactgtacttagaaggggcttggtttatttttagatatttaagctatcattaattttagaccaatggctaataataagagagatttttggttgctcatttatggagagacaaagaacagcatggcataaacaaacatcccagaaataaatgaaaagttttaagtgataaaattgtgttttctatgaaccagtgttgtacatgaaccaacattgtgtttcttagctctgacctgtacagtgaggtacctgtcaggacccctagtcttggcactggaaatgacaaagttctcctattactaaattctcatgccttccttttctgacttagtagattgaaattggtaggtactaatgatttatgtttgataaacttaagttctgctgatatcctgttactggtaattctggtaccaaaatttcaaacggtttgattattagtagcattttgagtacctaggtgcatataatacagttagcagacccttacagagtcaaaagagattttggaatctggtgatactgttgtttattacactagcctattacattttctttctttataataactgtttatgtgagtttcattgaaaatcgtggctctattgctttattcatggtttccacaactctttttgtaacaccttaattttctctcttaggtattttcctgttaaataagatatcaaaagcatcaatcacaagacagagaaaacgtattaggaaaaacttgtattagtatattctaaactgaaatggaaaaactcattattcatattttaataaataaaactcccaaatgatcttgctaaattatcccactatttagaagtagaaaataagagaagagtgctttcaaggaaatttgtcatattctcccttctatctagaagttgacaatgaattgcaataaaactaagaaataactgaatgctgaaaaataccatgaattaatgttatggcttctttatttttgtatatccattcccacaaaattgaatttaagattattaatgaaaattctatattaagtaataatgcttgtattagtaatgggcaaagaagtctttctttgttacattaaccgttagtaaaagatgtactttgacatttctgatgtaaaacctatatgtaaatattgtaatttaaatatgattggacagctgttaagttttggggagggaagcagatgccagcgttctctgctgaaaagacaagatggcgcttgacggaccacagcagatggagctggaggaggaaaaggcaggcagtggactctgccagtattatctgtccaagattgaagaactccagggtcaactgcaatataaattggatgggggaaagccacaaggaacagttctgaactccaggtgcatttgcagctgattttgaatgataagacccaaaacctctggaggcggcaggtgcacgggaatgaactaaatgttaaagtgtgcctattacaggaggagctacagctgctgcaggaataggactcctgtgtcagggaagtagtccaggccatgggtaagaagaaagtgttggtcaaggtgcatctcaaggacaagtttgtcatagatgtggacaaaaatatcagcatcagtgatgtgacacccagttccttggtggttctaagaaatgacagctacactttgcacaagatcctacccaacaaggtggactcattggtgtcactgatgatggtgaagaaagtaccagattcagcttatgaaatgattggtagactggataggcagatcaagaagatcaaagaagtgatcgacctgcctgctaagcatcccgagctcttcaaagcactgggcattgcacagcccaagggaatgctgcttggaagagactgttggcctgggctctggctcatcatagggactgtgtacctttattcatgtctctggctctgaattggtacagaaattcattggggaatttctgtgatggcagagaaaatgctcatctgtcatcttcatggatgaaattgactcttttggctcctcagagctggagggggatgctggagggaacagtgaagtgcagcagatgatgcttcgagggtggctttgaggccaccaagagtatcacggtttatcacggctgctaatacgattgatatcctggactcggcactgctttgcccagggcacattgacagaaaaattgaattcccaacctgcaatgagtaggcctggctggtcactttgaagattcattctcagaaatgaacctgacccaggggatcaacctgagaaaaattgctgagcttatgccaggagcatcaggctgaagtgaagggcatgtgcacagaaaccggcatgtatgccctgagtagcgagtccatgtcactcagaaggactttgaggtagtccaaagtcctatctcatgccaaaggacagtgaggaaaaacatgtccatcaagaaactatggaattgagggcacatcctttgtgtgtatccctacaataaaactcagtgggacaagcaaaaaaaaaaaaaaaaa

SEQ ID NO: 1825 - protein, 132 aa, Homo sapien
MGKKKVLVKVHLKDKFVIDVDKNISISDVTPSSLVVLRNDSYTLHKILPNKVDSLVSLMMVKKVPDSAYEMIGRLDRQIKKIKEVIDLPAKHPELFKALGIAQPKGMLLGRDCWPGLWLIIGTVYLYSCLWL

SEQ ID NO: 1826 - DNA, 2634 bp, Homo sapien
  Unsure 2131-2459: Unknown base
ggggccggaagccacggctcacttctgcttgcacttaggcgacctcgggagctcggactcctacgcagtcaccgggaagggccgccgccccgcccgcggctgctggcccgggtgacacttccgcctgctataagagcagcggccctcggtgcctccttcctgacctcgcacccagctcggagcccggagcgtgcctcggcggcctgtcggttttcaccatggagcagctgagctcagcaaacacccgcttcgccttggacctgttcctggcgttgagtgagaacaatccggctggaaacatcttcatctctcccttcagcatttcatctgctatggccatggtttttctggggaccagaggtaacacggcagcacagctgtccaagactttccatttcaacacggttgaagaggttcattcaagattccagagtctgaatgctgatatcaacaaacgtggagcgtcttatattctgaaacttgctaatagattatatggagagaaaacttacaatttccttcctgagttcttggtttcgactcagaaaacatatggtgctgacctggccagtgtggattttcagcatgcctctgaagatgcaaggaagaccataaaccagtgggtcaaaggacagacagaaggaaaaattccggaactgttggcttcgggcatggttgataacatgaccaaacttgtgctagtaaatgccatctatttcaagggaaactggaaggataaattcatgaaagaagccacgacgaatgcaccattcagattgaataagaaagacagaaaaactgtgaaaatgatgtatcagaagaaaaaatttgcatatggctacatcgaggaccttaagtgccgtgtgctggaactgccttaccaaggcgaggagctcagcatggtcatcctgctgccggatgacattgaggacgagtccacgggcctgaagaagattgaggaacagttgactttggaaaagttgcatgagtggactaaacctgagaatctcgatttcattgaagttaatgtcagcttgcccaggttcaaactggaagagagttacactctcaactccgacctcgcccgcctaggtgtgcaggatctctttaacagtagcaaggctgatctgtctggcatgtcaggagccagagatatttttatatcaaaaattgtccacaagtcatttgtggaagtgaatgaagagggaacagaggcggcagctgccacagcaggcatcgcaactttctgcatgttgatgcccgaagaaaatttcactgccgaccatccattccttttctttattcggcataattcctcaggtagcatcctattcttggggagattttcttccccttagaagaaagagactgtagcaatacaaaaatcaagcttagtgctttattacctgagtttttaatagagccaatatgtcttatatctttaccaataaaaccactgtccagaaacaagtctttcattttctttgtaagtttggctctgttggctgtttacacccatgaattttggcatgggtatctatttttcttttttacattgaaaaaaatccagtggttgcttttgaatgcatcaagtaaagaagaagaaaagaatacatccgatgcgtagattcttgaccatgtagtaatctataaaattgctatatcctcctgatagccatgggaaaacatgataagatggtcatttattttgcagttagaattttggaagccacaaaatagacagacaccctgactgttgaagggaggtttaaaaacagatattcaattgaaatgtaagagagcaccccaattgagagcccaggttacgaagacaagcttgcctcgcctgacttttctgtcccttgttctgcaggattagtattctgttacagacctctagtttttagactcttcaattaaagggccaatggttataacctgcattcccttttttgttcttctttatgtataatatatagttcatgtggcgctgcatgaaatcaagaagtgggtgtcttaggataaaagataccaagagtctacaaaaataaccatgtagtaagataaactgctgaacaaaggttttactgttagccaccttctcatgtgttttcttttctctttttccgtnnnnnnnnnnnnnnnnnnnnnnnnnnnnnnnnnnnnnnnnnnnnnnnnnnnnnnnnnnnnnnnnnnnnnnnnnnnnnnnnnnnnnnnnnnnnnnnnnnnnnnnnnnnnnnnnnnnnnnnnnnnnnnnnnnnnnnnnnnnnnnnnnnnnnnnnnnnnnnnnnnnnnnnnnnnnnnnnnnnnnnnnnnnnnnnnnnnnnnnnnnnnnnnnnnnnnnnnnnnnnnnnnnnnnnnnnnnnnnnnnnnnnnnnnnnnnnnnnnnnnnnnnnnnnnnnnnnnnnnnnnnnnnnnnnnnnnnnnnnnnnnnnnnnnnnnnnnnnnnnnnnnnnnnnattaaggctcttgacttccaaggctgtgtggggagatggggtgggggctcttggactgatataaaactttgtcaaatgtagttctttgaatggagcttgaaacgccgcatattcttgctcccacaaggatagtgggcatcatgaattaataaaacgtcctaggattctgcaagct

SEQ ID NO: 1827 - protein, 451 aa, Homo sapien [sequence omitted]

SEQ ID NO: 1828 - DNA, 2268 bp, Homo sapien
  Unsure 2120-2139: Unknown base
ggcgccattttgctggagcctgcgaccgagtgggagtggagtggagcggctgtggttgccgactctttcctcttccccacggtccagtcagcgggttaattaggccatcggccctcgagccgagacttgtctcttatttagttctggggagcgcctcgtcgacatgagtgatgtggaggaaaacaacttcgagggcagagtgagtacaaagccgcgggagccgtctaggcggcggcccaatgctcggggtttcacgggaacaagcgcggtcgggcggggttgcgggtagtcccgcgaggagcaacctctggagccatcgcgattgattcctcccatcccaagatggcttctgggttccactccttccccaaacaccacggataacacccctcccccttttttggaggctgactgatacctggacttctgggtcctcttccctccccgcccccgcattgcttcctcccttctccccacccctgaggcttccttatgtctgctccgaggtgtgggtccccgtcgcggttgggcgggaggaggcggcagggagctcccctccgtccggatagtggtaggtgcttcctgcggtggcatttctggcgaccccgagcatcgtagagggtctcgggatcgaaagtgcgcggggctgctttccgggcggggagaagctggcgtgggactagctggggcctgtgtctccttggctctctatttcagtgagcggccgcgtctctgttggaaccggcggcgttgcgtctaaaaaggcgaaagccttgaggttgaaggtgggacgagcctaatgaagtggttagtcaacgaccgcaccgacccttaagcgttcttaagacgagagctgtgaggggaaactacgcaaggagcccttttcccttaatgtcccttcgactttcctttcacttcgaaatgaatgtggaaatgctgtcacgccttatttttctaattcctcgatgttgggttttttctcttctttatatctcaacttttaatgctcttcttcctatgacctttcatctaaaaactgaccactcctttacaggtttttacggtaaaaaaaaaaaaatcggtctttctttaatcttacatagctgaacgaattcattggctcagtatttttaagataactagtcagtatatactgttctgtaacttaaaagatgacctgaaaattaacaggccctctcccatttctcttctcactctatcccccaccgaagagggctcagaaaaaagtttttattaatatatttggggtcggagaaatacaaacatcacaaagaatacgatatccccagcttaaatgtactggaacgtttgtcagtgagtttcatttccaaagtttaccctacatagggaattgtagaagtgagttagtagaagtgagttcgtgtgaaaccctggaaagaaaacaaaagccccatgcaacacgttccgggctgttgtgtagatgtttattctagtcactaggggaagcacataaaaacacctgaggtgtgtgtgctgaagggcgaattttgtccttttggggagttcatgatataaacatctagaaccaaaaagtcaaatcagaaggtcagtttaggctttagttctctttgaggaaagatttaaagcaatagactataatagttacccggtagactaaaaaatttgcctttaattcttttgattggaatttttttttacaaagtttggagcatggaaacaaatgaaaattgaacctgcttattttttaggatggtgtattgatggccccaacagaactttctaaaatcatgcgataaacatatatgatagtagttgtaaaatgcttcttgttttgaaaatgttgagtaattatcgatagaaattttgctgtccattcatacattccttcaattaactttcattgttaaaaaattgggggattgatgtttggtttggtttgtggggagtgaagaggactactggagggaccttgtttgcttgctttttttctttttttaatttatcatcaagtctaggaaaggagtaagttgccgacaattgtcacttttccctcctaagaaagtaacatgttaagattcccacctaccagcctgggtgacagtgagactcccgtctcnnnnnnnnnnnnnnnnnnnnttcccacccacttttaagctaaagtatatgtaggcattaaagatttatttaatagaaataaagggccctcttacggccctttgtggtcataggaaatatttttttcacaagtggtacccaagtgtattt

SEQ ID NO: 1829 - protein, 54 aa, Homo sapien
RHFAGACDRVGVEWSGCGCRLFPLPHGPVSGLIRPSALEPRLVSYLVLGSASST

SEQ ID NO: 1830 - DNA, 1939 bp, Homo sapien
gaacacaaacatgcagtctgtagcagatggtaataggctgayatattacacttgttgatgtaaatctgataggtttctttctctccaaggacagctttttaaatatttaacagtatcaataatttttcagtttctgtgagaattttataatttataatttgcagacttaatgtataatctattttgtcctaacaattacaaatatattttttatttcagattrtatatattcctaccagatggagataattacagctttaaaaatttttattttttcattttatttcacacattgacattaaatttttatggacacataataactgtacatatatatggggtagaatgtgatgttttaatacatgtactcaatgtgtaatgatcaaatcagggtaatttgcataatgatttttctgtagggagaaaattcaaaatctactcttctggctattttcaaatatataatatgttattgttaactatactcatcctactatgcaataggacaccagaacttattcctgggttctacatccgttaaggcaaccaaggattggaaatattggaaaaaaaaattgcgtctgtactgaacatgtacagacttttttcttgtccttattccttacacaatatagtacaataactatttgcatgacatttacatcggatattatgagtgatctagagttgatatgaagtatatgggaggatgtgcaaaggtgatgtgcaaatactatgtcattttatatcagggacttgagtatcctttgttaycctcaggagatcctgaaacyagtcccccatggatactgagggctgactgtatagtcctatcctcacggaactttcattctaatgrgggaagactgactataaacaaaatatatgtaataggtggtggtaagtaccgtggagaagtaacaaatggggcaaagtgagttatacagctccatycttagaaaccttggagtacttttcttagtttatactcgtggtggtttccttttgtctcctttattacatgggactctgacatgtgcccatagctagggtggcagtaggatctacccgaaaagcgtcctgctgatacaggaccaaagcatcctgttgttctcgagcctataaaaagagctaatggtcttgcttctcttaactgtggcctcctacactgtgttttggatgattggtgatgtcttggatattctgtttctttggaactttgaatatacaacactttactagggaattagcaatggaagcagagcaaagatgtacagaggaaacaatgcrtaactctgatggaattgaagtcatgaggcagcagagagcttaaattasagctttaaaaatttttattttttagagggaatttamttgggagtaacagcagtaatagttaacggagccagaatgcttgagtcatataattgcaaagcagagttgggagcaacagatgctaaagagtagttgctgtagttcctctttgggtcgtaggagcagttgtcatrttmctatayagctactgcatgaagaagagttcttagtgaggcctgggtgaacagctcttcttagtattctgtgtgaccccattygaccttttaacaaatccctaagtaaataaatagcccctmaggwaaactaagtttttctctgctgtttttttgcttgagagagctataactgtaatagacttatatttctgaacattttagtgcttgccaatatttggtaatatttatgtttcctatatttgtaatgaacattcttcttcmggtacatttyttgttaaattattgtttsatgsataaaagttcaccttttattgtataaaattgactcagattaatttatacacattgacaatgggtaaatagagtttttcagattattaaaagctgaaggatgcccatgtaagcaaaaaaaaaaaaaaaaaactcga

SEQ ID NO: 1831 - protein, 35 aa, Homo sapien
IYSSGYFQIYNMLLLTILILLCNRTPELIPGFYIR

SEQ ID NO: 1832 - DNA, 1035 bp, Homo sapien
atctccctccaggcagcccttggctggtccctgcgagcccgtggagactgccagagatgtcctctttcggttacaggaccctgactgtggccctcttcaccctgatctgctgtccaggatcggatgagaaggtattcgaggtacacgtgaggccaaagaagctggcggttgagcccaaagggtccctcgaggtcaactgcagcaccacctgtaaccagcctgaagtgggtggtctggagacctctctaaataagattctgctggacgaacaggctcagtggaaacattacttggtctcaaacatctcccatgacacggtcctccaatgccacttcacctgctccgggaagcaggagtcaatgaattccaacgtcagcgtgtaccagcctccaaggcaggtcatcctgacactgcaacccactttggtggctgtgggcaagtccttcaccattgagtgcagggtgcccaccgtggagcccctggacagcctcaccctcttcctgttccgtggcaatgagactctgcactatgagaccttcgggaaggcagcccctgctccgcaggaggccacagccacattcaacagcacggctgacagagaggatggccaccgcaacttctcctgcctggctgtgctggacttgatgtctcgcggtggcaacatctttcacaaacactcagccccgaagatgttggagatctatgagcctgtgtcggacagccagatggtcatcatagtcacggtggtgtcggtgttgctgtccctgttcgtgacatctgtcctgctctgcttcatcttcggccagcacttgcgccagcagcggatgggcacctacggggtgcgagcggcttggaggaggctgccccaggccttccggccatagcaaccatgagtggcatggccaccaccacggtggtcactggaactcagtgtgactcctcagggttgaggtccagccctggctgaaggactgtgacaggcagcagagacttgggacattgccttttctagcccgaatacaaacacctggactt

SEQ ID NO: 1833 - protein, 275 aa, Homo sapien
MSSFGYRTLTVALFTLICCPGSDEKVFEVHVRPKKLAVEPKGSLEVNCSTTCNQPEVGGLETSLNKILLDEQAQWKHYLVSNISHDTVLQCHFTCSGKQESMNSNVSVYQPPRQVILTLQPTLVAVGKSFTIECRVPTVEPLDSLTLFLFRGNETLHYETFGKAAPAPQEATATFNSTADREDGHRNFSCLAVLDLMSRGGNIFHKHSAPKMLEIYEPVSDSQMVIIVTVVSVLLSLFVTSVLLCFIFGQHLRQQRMGTYGVRAAWRRLPQAFRP

SEQ ID NO: 1834 - DNA, 863 bp, Homo sapien
tagatatttttcaaaaatacagtgatgtcattgcaggacaattttatggacacactcacagagacagcattatggttctttcagataaaaaaggaagtccagtaaattctttgtttgtggctcctgctgttacaccagtgaagagtgttttagaaaaacagaccaacaatcctggtatcagactgtttcagtatgatcctcgtgattataaattattggatatgttgcagtattacttgaatctgacagaggcgaatctaaagggagagtccatctggaagctggagtatatcctgacccagacctacgacattgaagatttgcagccggaaagtttatatggattagctaaacaatttacaatcctagacagtaagcagtttataaaatactacaattacttctttgtgagttatgacagcagtgtaacatgtgataagacatgtaaggcctttcagatttgtgcaattatgaatcttgataatatttcctatgcagattgcctcaaacagctttatataaagcacaaatactagtatttcacagtttttgctaatagaaaatgctgattctgattctgagatcaatttgtgggaattttacataaatctttgttaattactgagtgggcaagtagacttcctgtctttgctttctttttttttttctttttgatgccttaatgtagatatctttatcattctgaattgtattatatatttaaagtgctcattaatagaatgatggatgtaaattggatgtaaatattcagtttatataattatatctaatttgtacccttgttgaaattgtcatttatacaataaagcgaattctttatctctaaaaaaaaaaaaaaaaaa

SEQ ID NO: 1835 - protein, 177 aa, Homo sapien
DIFQKYSDVIAGQFYGHTHRDSIMVLSDKKGSPVNSLFVAPAVTPVKSVLEKQTNNPGIRLFQYDPRDYKLLDMLQYYLNLTEANLKGESIWKLEYILTQTYDIEDLQPESLYGLAKQFTILDSKQFIKYYNYFFVSYDSSVTCDKTCKAFQICAIMNLDNISYADCLKQLYIKHKY

SEQ ID NO: 1836 - DNA, 1385 bp, Homo sapien
ttcagagcacaggatggaacaagaactccagccactgactgtctcatgtatctgcaagggccgaggaaattaatgacccaaggaggctatgatatggtccaaaaacttttcctggattttttccgtaggcggctgagccagaggccaactgcagaggaactggaacagaggaacattttgaaacctcggaatgaacaagaggaacaggaggagaagagagagatcaagaggaggctaacccgaaagctcagtcaaaggcccacggtggaagagcttcgggaaagaaagatcctcatccgcttcagtgactacgtggaggtggctgacgctcaggactatgaccgcagggcagataagccgtggacccgcctcaccgctgcagacaaagctgccatccgaaaggagctcaatgaattcaaaagcactgagatggaagttcatgaattgagtagacacttaacaaggtttcaccgaccttaacagtcgaattcctcttgagtgctatgctgtcttcaaaacataaatttataagaaccataagtgctggtatttattcacttccccattacgatgtaaatcttctgaactgccttttttttaaaaagaagaaaaatcaaggaaacacaatcaggattttatgtgtgaaaacgcaaaagtgatggctcggcggtccgagctgctggtcccacttctgacaccaaaatgcatcccaacccccggcagtgccaagggcaccagcagggccctgactgaagactgtctggcaggtggaacggtccttgtcctctccagccaggcccagcaggcactaccttcataagtctccagcaaacctcttcctcacaagtgtctgtcatctgagtccaaagaaagctgaaggggtgggtttgttttgggggtactgtgcaaagctaatgatctggttggacttctacacttggccaaatgtactggctccagacatgacatttggtttgggggccctttgaagttgatgccaagaaggagtgaacacttctcagttgcccctggcttttccgaaccatccagcgtccctgaatataaaatgtacagagtgcagtgggaagcaggctggagagaggttcacaggggccagaccacccagggatttatgagccgattggaggagcttggactttatcctgtggaaaatggggaacccttgaaaatcttcaagcagagagtgacttgatcagagttgtcttttaggaagaattctctggtagctgtgcagggaatggtttacagaagagtaagaccagggcacttatgccagctaggagataccataggaatgtcagcaagagttgcttgagacagcatggtgggagaggatcagggtagtggttatgtgcaaaagctct

SEQ ID NO: 1837 - protein, 159 aa, Homo sapien
FRAQDGTRTPATDCLMYLQGPRKLMTQGGYDMVQKLFLDFFRRRLSQRPTAEELEQRNILKPRNEQEEQEEKREIKRRLTRKLSQRPTVEELRERKILIRFSDYVEVADAQDYDRRADKPWTRLTAADKAAIRKELNEFKSTEMEVHELSRHLTRFHRP

SEQ ID NO: 1838 - DNA, 8213 bp, Homo sapien
cccccagcagaagggcgcgacggctgcaacatcagcggttaaattgtacagcctttcataggccggttcaatgcatccgtactaagattgttaaggctgagggtccctagcctggggaaaaacgaaaggaggcagagggtagggagacgggaaggaagacaaggagggtgtagaaaacggggagaggagggggcgggacagcatggggaaggcctcaggtttactggagagatcgtggcgttcccatagaaacgtatccctccgcccatgacccgcgtgttagtctcttcagttccttccgcgtcgtttcttggctgtttccgcccagctcctttgtgccgcgcagaacaacgagatgacgcatgcgcaaagcgcagcggccgcatatataaacgcgaacccgggctcttcctcgtagtgccgccgggactcttggcgggtgaaggtgtgtgtcagcttttgcgtcactcgagccctgggcgctgcttgctaaagagccgagcacgcgggtctgtcatcatgtcgcgttacgggcggtacggaggaggtaagaagctggagtccggtgagggacgttggtgtgggtgtagtgagcactgcgaggccgtagggttgtcgcggaggttgggagacggttattccgcgtgcgtaatggcggcttaggagcacgccagacgaagccggaggcagcggaggcggggtgctgaagggagacgggatggcgggtgtacatctctgccgagttccgtactcttgggcatttttgtggcccaatccagcctaaagcagggttgagatgacggttttcgcgttgcctttctcggagctgcccgccggcccccctccccccccgccctcggccggcggctgccattttgcgcacattgaggaccgtggtggcgcatttcctcagcgctttcccgccacttcagcggacagatctggccgcagctgtaagatcgtggttgtgtttgagatagaacgaaattggcagctgtgagctgcatgttctcgtcaaacaatcggttaaattgcggaatgggaatggggacgtaatctgcgactggcggctgggtttttttttagttatttccagcgcggtttatggctctggggcggggagctggagtcttgggcgagcctgtgcctgggacgtttgccgcggaggacgagagccggcgcagccctgctctcctggcccggcccctaccgaggccctcccgccgccgacgcgctgccgctgcgggcccgcgcgctcccggtgcgcccggggctgccgggactcatgggtggggccgggccaggtcccgccccacgcctcggtgtatcctaccacgcgtttctgcttgtgttcgggagggtcaccccgcattatttagaacgttaagaattttgtcaaaagtctagtttctcggggatttgcggacttcaccagttttacgactaagttttgtcttggatagagggcattaaatgtgctttacccaatcttgaggatggcccgttttaaggcaagtaagtaattgaaacttgggccagattttgcataacgtgcattcttctatttgcgtttttaaacagaaaccaaggtgtatgttggtaacctgggaactggcgctggcaaaggagagttagaaagggctttcagttattatggtcctttaagaactgtatggattgcgagaaatcctccaggatttgcctttgtggaattcgaagatcctagagatgcagaagatgcagtacgaggactggatggaaagtaagtaagatgttatgaatcttctgttcattaaaatatactgtggctagataatgaacttagtgctaaatttggattctgaagtctggaagagaccttaaatagctggtcatagtgttaaatgctaaaggcacacgaaggttaaagaagatagcggagatggagttagggcttggtaaagaccgccaaagtttgttgggggggaaggagtggttggaaagagtgagtggttggaaagagttctttttaaatctataagtcctgaatatatttttaactttagaattttgttaatttgcttttattagggtgatttgtggctcccgagtgagggttgaactatcgacaggcatgcctcggagatcacgttttgatagaccacctgcccgacgtccctttgatccaaatgatagatgctatgagtgtggcgaaaagggacattatgcttatgattgtcatcgttacagccggcgaagaagaagcaggtatttattttaataaaggaatggttggtattctagttaatcaagtaattcttttattagcaaggcagaaactagtgtttttctataaacttgaatgttaattgtacaggtgtattttacaatttgtgtttaattaaaaaaatgttactatattaataatcaacctggtcaaaacctttcaggtttcttcgtttgagtcagtcgccttgattcagaatgtcacgagccttatgatatcatgctgaggcgccttgcaaatccgacaattaagatcctcctagaccttgaggtgatcagcataagaggccagatcccctcgagtcatctacacctagcttcaccttattctttaaagggcagaaaatttgagacggtgatcgccgtaacagtaaatttggcttacaattggggcccccctccggtttagaaagaggaacaccagattgaccacattcccaactagaaaaatcttcttgcgtcaatcaagcctcacctggctcatttggctgtcagtttgatcgtcgttagattgaagaaaacatctagatgcagcgatcggctatagatacttctagatcgtctagatctactagaccatgggccaaagagggtcgacctgcaaacttgcaaggtttatgttaaatacacattacagtgttttatattatgtaatgctaagttgtaattcagcttttaacaaatctttttttaggtagtaaaaaaaaaaatactcaacaactaataggcccagagtttatttccaaatgagacactaaatttaaatagttttgagatttgatttcagcagaggcacacaaactcttaaaaacgagttattgtctgacattttgttttttctctaacttgaaaaataggtcacggtctagatcacattctcgatccagaggaaggcgatactctcgctcacgcagcaggagcaggggacgaaggtgagatcttgtttaactgaagtctttctgtattattattaaattcactggtagtccaacacagaaaaagctcattattttttttggagacagggtcttgctctgtcacccgggctggagtacaggggcataaccacgactcactgctgccttgatgatctcttgggtttaagcagttctcctacctcagcctcccgagtagctgggactgtaggcactgccaccatacccagctaatttttatttttgtagaaatggtcttgcactgtttcccaggctggtctcaagctcctgggctcaaacgatcctcccgcagtgctgggattatgggcatgagccactgcaccgttccccagttgaagtcttaacaggccaaaaaaaaaaaaaactgtggagatggacttaaagttctttattttaggtcaaggtcagcatctcctcgacgatcaagatctatctctcttcgtagatcaagatcagcttcactcagaagatctaggtctggttctataaaaggatcgaggtatttccagtatgtaacactttttttccttacttgtgtttggattgttcacatcttatcagtagagtgtcttaaggacataattcaaatggattgcttcagggaatatttgagatgtaaaagtttggaatttatgtgtaacttgtaacataaatattaccctagtttcacagatgaagaaaagggctactagagattttaaggcttgttaggccgtgtggtagacaagggtcccaagcaatacagctctactcaacactctgggtaggcatgttgctataaacttttctggcttcagattggatgatactagctctgaaagatggtaattgattttcccgacaaaaaggcctattagcaccaggaaaagagatcagaagcaagtagaaacatttctcatttttggaatgatggggttgatttgagacactggaaagttgactagggcagtagtgtgtacacagaaatgaatgtggattttttttttagaccgtttcagacctgaaaaaactaaagaaccagagctttactatttgtagaaggccttaaaaggagatagaatggaaaaaattgtaaaataagtattgcaacatgtaattaacaatattgttatctgtaccaacgataaaaccgtggtacggaatgctactgggagttaaattgctgtttaatagcacaaaacctttaaatgcaggaattctgaatcttgtggtctatttgagaaagctatgaaccatctctttagataaatttaaaagatagatatgtcagtctgatttggtttgtctgacagattgatggctctcaaacataacttgatccgggaagaagcctgacaaatggggggcggctttcttttcgtctggccttatcacctgaattagtctcagttcaggggtctggttattttcatcctgccttagcctcctgagtagctgggactgccattgtgtaccacagtgcccagctgagggatctgtgccttaagtgaggttagttttgcttccttcataccagtctcatcaaatgaaaaccatgtatttcccttggatattacacagtgtttgagaatgttatacctgtacagaaactaaccaattgagtgatagaaacaagtaattgaaatgggggttccttatgtctggtaacactttgtttgacagtgtgttagacagaataaggcaagtgttgcatcttgtttagttttagcttctttatgcctgaccaacctaatacagtgttgagtagttaaggaaattcctttggactgattgatataattgtgttttttcactttttttattaagatccccgtcgaggtcaagatcaagatccaggtctatttcacgaccaagaagcaggtagggtaaaaatttgattatccttttctagttatatggcaccaatatccaaagagttcaaagtgtttttaattgttgaaattttaagtgttaactctaaacttaggttttagtgggaacacagtaccttatttgtgtatgtcctatttattactggctgactttccctgaacaagggaatgtaaaactatagtgagaaagaagcttatgacttgggggattatattaaagaggcccttgttagaactgataggtgcatggagaagcatcctgaaatcgatgtgcttaaagcagaatgtaaaagattaatcatgatgtagtaattgagtcattttttgaaaaacagttgttgaaagattggcttttgttagcaacaactggtaggatgtttttcagtttaagtgcagtctgacattttaagcttaggacatttgggggttttacggtattggtgactacaagaaagggattggttagtactctttctttaatagaatttctcatgttttgacagccgatcaaagtccagatctccatctccaaaaagaaggtaagctaaatgttttgttgccaaatcttgcctgtcaagtgtggcctctgcagaatttgtttgcttactgctttgcagtctttgagctctttggagaattggtgctatatagattaaaatactatgctaagtttctgaaatactttttttttttgattcagtaacattagtttatacttttgctggaaatacttagtcataaaatgttagggtgattattaagatgtgattggtcctgtgagtacttggtagaaattttggtaagatagatgccttttccccacatgtacaatagatacaaagtgtggagaaaagtcttggaaatagttacctgcctagtgcttctttatgaccagaaaacttcaaatagttgtcatatttatctagtgcttcttaatgaccagaagacttcaaatagttgtcatatttaactgcaggttgaccttgcaattttgacaaggaggatagcctaatttttttttttttctgggatggagttttcgctctgtccccaggcttggagtgcagtggctcaatcttggctcactgcagcctccgattcccgggttcaagcaattatcctgtctcagcctcttgagcagttgggattacaggcacccaccgccaagcctggctaattttttgtatttctagtagagacggagtttcaccatgttggcgaggttggtcttaaactcctgatcttaggtgatcacctgcctcggcctctcccaaagtgctggggttacaggcgtgagccaccgtgcctggccagggtagcctaatcttaagccagggacaaaagatgaatatatgtaagtttcatgtcatttttaggtctttgctataggaaattagtaccttaggccacctttgaagttattgaaagttagtacatgtacatgagagtttcaattgacactaattggatccaaacctaatgtttttctttttagtcgttccccatcaggaagtcctcgcagaagtgcaagtcctgaaagaatggactgaagctctcaagttcaccctttagggaaaagttattttgtttacattattataagggatttgtgatgtctgtaaagtgtaacctaggaaagataattcaaccatctaatcaaaatggatctggattactatgtaaattcacagcagtaaggataatataaattttgttgaatgtatgaacatcatatggtctgaaaatgtgggtttttatttggcacatttaaataacatgtttctaactagatttttgatttgtgttcaatattaacacttcttaatttgatatatttgagagtcagacattataattgttaatccttattcatacatacctacattcagaattgaaaggtgttggttaagtcttgaacatcactattctatgcataaaacttggccaggatcttaagggactttgaaaattccatcttacccttgtagctctgggtaagatgacctgagtcccttatgatacagcctgaatgcatcatgacagatccttagttagctaatccgtttgaagttggtgttagtaggtattgtatgatcagtggtgaagcaagtaggaccactgatgtgtctaaatgagcatgacaggaactaaacgaaactgattaaatgtatgagaaatagaaactgatttctggatgatctttatactaattgcagctttcaggctactaggtggcatagtgttaattaggactccccaagatatggggagttctactctcaatggtcttgtttctttgctttctacattagttaaccagttttataccaaaaaatgcatgtttgaggaattgtctgaaattgggacaaaacaccttcatgtaaaccagctttgcaaaattttccagcccagatactcttcatctattcaaatggattgtcttattctgagcaaagacctgttgttaatcttcaagctaggttttgcagttcccaaccacaacattcttctattttgccaggctggtgcaaagtaattaaagatgtcaatcagaaatgtcaatgagactaaagtggttttgtaaatctcagctatatttagcaacactccatgtagctaatattttttggtagcatctggtagaccttagaatgttacatagccagtaggttctttattcaaattttaagtatcttaagaatagtagggcagtaacagttacttttgagagttttctggtcaagcttttaccaggcattctctagccttggtacaaaaaaaaaaaaaacctgctggttgcgcagatacctaggcttgtccattttatgcatttcagcaaagtcattggagactattgcaacttgggaatactggtctgcatcaagtttaattcggtagtttgaccgctagtatgttggaagttatttggattgtttttggaattttgactggctgaattatggttggtataaagttatgtgtataactggcaggcttatttatctgttgcacttggttagctttaattgttctgtattatttaaagataagtttactcaacaataaatctgcagagattgaacaaataatcctgatacttaatttttggaagtgggagctc

SEQ ID NO: 1839 - DNA, 889 bp, Homo sapien
gggtcgaggtcggacggtatcgataagttttttttttttttttttttgtttacttttcatttattcacatttcatggattgttacacttcctcgatgggagcattcaaaaactaatacaagctgagattatattgtctgacaattcaagtattttagttttagaaaacaatttcctatttaaagtaaaaagcaaacaatttatccatctgattgctaagaagttttacatctccattacaattgtgtctgcatcaaacggagagtccttcgtcctcagtatgattgttactggctgagaacatacggtgacctgtgttctgagtgcctgcttggaaaagacctccctgtcatctgccatactacgggacaaatcagtatctactcaaattcccacttccagaaggagaggactcatcaggggtttaggagtttgcaaagccttcaaaatgtatcgtgcttgaattttgactcttctgaaatagaataactgacaaatgctcaaaaaaacaaacttgtttaacttttactgaaaaggctctcagtgaaaacttgttttgaactctactagtaaggtagaatattagtttttcttcccctccacaccagaaaaggcagttttctcttttttttttttttggcatgcagcatatataaaatgtgatctagaattgaaattgtaaaacagaataatcctcttaaagaaaatcagcctatgaacagtcagacttgtccttccatggaaaacataatctaaacttctttaaaaactggccatattttttcagtctgtaattcgaataatgaagatggcataacaaatttttttgcttactaggaatgcgcaagaggatgagatggatacacaggtttaaaaaaaaaaaaaaaaaa

SEQ ID NO: 1840 - protein, 98 aa, Homo sapien
GSRSDGIDKFFFFFFLFTFHLFTFHGLLHFLDGSIQKLIQAEIILSDNSSILVLENNFLFKVKSKQFIHLIAKKFYISITIVSASNGESFVLSMIVTG

SEQ ID NO: 1841 - DNA, 2000 bp, Homo sapien
attttcctggggctccggggcgcggagaagctgcatcccagaggagcgcgtccaggagcggacccgggagtgtttcaagagccagtgacaaggaccaggggcccaagtcccaccagccatgcagacctgccccctggcattccctggccacgtttcccaggcccttgggaccctcctgtttttggctgcctccttgagtgctcagaatgaaggctgggacagccccatctgcacagagggggtagtctctgtgtcttggggcgagaacaccgtcatgtcctgcaacatctccaacgccttctcccatgtcaacatcaagctgcgtgcccacgggcaggagagcgccatcttcaatgaggtggctccaggctacttctcccgggacggctggcagctccaggttcagggaggcgtggcacagctggtgatcaaaggcgcccgggactcccatgctgggctgtacatgtggcacctcgtgggacaccagagaaataacagacaagtcacgctggaggtttcaggtgcagaaccccagtccgcccctgacactgggttctggcctgtgccagcggtggtcactgctgtcttcatcctcttggtcgctctggtcatgttcgcctggtacaggtgccgctgttcccagcaacgccgggagaagaagttcttcctcctagaaccccagatgaaggtcgcagccctcagagcgggagcccagcagggcctgagcagagcctccgctgaactgtggaccccagactccgagcccaccccaaggccgctggcactggtgttcaaaccctcaccacttggagccctggagctgctgtccccccaacccttgtttccatatgccgcagacccatagccgcctgcaaggcagagaggacacaggagagccagccctgagtgccgaccttgggtggcggggcctgggtctctcgtcccacccggagggcacagacaccggcttgcttggcaggctgggcctctgtgtcacccactcctgggtgcgtgcagacccttcccctccaccccccaggtcttccaagctctgcttcctcagtttccaaaatggaaccacctcacctccgcagcacccgacttaccaggacgcatgcccctccctctgccctcatcaaacccacagacccggactccctttctgccaccccaggctggtccggccccaggtgtggggtccgctctctccactcccagggctccgcgcccaagtgagggggcccctgccggagcctcagacacactggagttcagggctgggggggccttggcacatacctgtcccttggctatgagcaggctttgggggcccttccgcggcagccccgggggccgaggtagggtctgggggcttagaggctgggatggctcctggccccaccgccagggggcaagcgcaggccgggctgggaggcggcggcggcggctcgggctggggggtcaggtggacgctgcctccggggctggtcgcgcatccctcagtccctcggccacccgggggtcgctccctcgtgcccaccgcacctgccgagcctctttggacccagatctgttcatgcttttgtcttcgtcactgcggcggggccctttgatgtcttcatctgtatggggtggaaaaatcaccgggaatcccccttcagttctttgaaaaagttccatgactcgaatatctgaaatgaagaaaacaaaccgactcacaaacctccaagtagctccaaatgcaatttttaaaatggaaaacaaaaatctgaaagaaacgtctttagtggctttaagccccaaaacgtccctaaggcgtcctcgagatgaagacgggggggagcccccagccaggtggagaccccgcaggacgcggcggcgcccggtgaccgaggcctcgcacagccggccgccctgagggtcgggccggagccagggtccaagaggggcgcgtttgtgtctcgggttaaaataaggttccgtccgcgtgctgggtcaga

SEQ ID NO: 1842 - protein, 248 aa, Homo sapien
MQTCPLAFPGHVSQALGTLLFLAASLSAQNEGWDSPICTEGVVSVSWGENTVMSCNISNAFSHVNIKLRAHGQESAIFNEVAPGYFSRDGWQLQVQGGVAQLVIKGARDSHAGLYMWHLVGHQRNNRQVTLEVSGAEPQSAPDTGFWPVPAVVTAVFILLVALVMFAWYRCRCSQQRREKKFFLLEPQMKVAALRAGAQQGLSRASAELWTPDSEPTPRPLALVFKPSPLGALELLSPQPLFPYAADP

SEQ ID NO: 1843 - DNA, 2711 bp, Homo sapien
caggagaagctgaccagccgcaagatggacagccgctggggcgggcgcagcgagtccatcaatgtgaccctcaacgtggagcaggcagcctacacccgtgatgccctggccaaggggctctatgcccgcctcttcgacttcctcgtggaggccatcaaccgtgctatgcagaaaccccaggaagagtacagcatcggtgtgctggacatttacggcttcgagatcttccagaaaaatggcttcgagcagttttgcatcaacttcgtcaatgagaagctgcagcaaatctttatcgaacttaccctgaaggccgagcaggaggagtatgtgcaggaaggcatccgctggactccaatccagtacttcaacaacaaggtcgtctgtgacctcatcgaaaacaagctgagccccccaggcatcatgagcgtcttggacgacgtgtgcgccaccatgcacgccacgggcgggggagcagaccagacactgctgcagaagctgcaggcggctgtggggacccacgagcatttcaacagctggagcgccggcttcgtcatccaccactacgctggcaaggtctcctacgacgtcagcggcttctgcgagaggaaccgagacgttctcttctccgacctcatagagctgatgcagtccagtgaccaggccttcctccggatgctcttccccgagaagctggatggagacaagaaggggcgccccagcaccgccggctccaagatcaagaaacaagccaacgacctggtggccacactgatgaggtgcacaccccactacatccgctgcatcaaacccaacgagaccaagcacgcccgagactgggaggagaacagagtccagcaccaggtggaatacctgggcctgaaggaaaacatcagggtgcgcagagccggcttcgcctaccgccgccagttcgccaaattcctgcagaggtatgccattctgacccccgagacgtggccgcggtggcgtggggacgaacgccagggcgtccagcacctgcttcgggcggtcaacatggagcccgaccagtaccagatggggagcaccaaggtctttgtcaagaacccagagtcgcttttcctcctggaggaggtgcgagagcgaaagttcgatggctttgcccgaaccatccagaaggcctggcggcgccacgtggctgtccggaagtacgaggagatgcgggaggaagcttccaacatcctgctgaacaagaaggagcggaggcgcaacagcatcaatcggaacttcgtcggggactacctggggctggaggagcggcccgagctgcgtcagttcctgggcaagaaggagcgggtggacttcgccgattcggtcaccaagtacgaccgccgcttcaagcccatcaagcgggacttgatcctgacgcccaagtgtgtgtatgtgattgggcgagagaagatgaagaagggacctgagaaaggtccagtgtgtgaaatcttgaagaagaaattggacatccaggctctgcggggggtctccctcagcacgcgacaggacgacttcttcatcctccaagaggatgccgccgacagcttcctggagagcgtcttcaagaccgagtttgtcagccttctgtgcaagcgcttcgaggaggcgacgcggaggcccctgcccctcaccttcagcgacacactacagtttcgggtgaagaaggagggctggggcggtggcggcacccgcagcgtcaccttctcccgcggcttcggcgacttggcagtgctcaaggttggcggtcggaccctcacggtcagcgtgggcgatgggctgcccaagaactccaagcctaccggaaagggattggccaagggtaaacctcggaggtcgtcccaagcccctacccgggcggcccctggcgccccccaaggcatggatcgaaatggggcccccctctgcccacaggggggggccccctgccccctggagaaattcatttggcccagggggcacccacaggcctccccggccctccgtccacatccctgggatgccagcagacgaccccgggcacgtccgccctcagagcacaacacagaattcctcaacgtgcctgaccaggggatggccggcatgcagaggaagcgcagcgtggggcaacggccagtgcctgtgggccgacccaagccccagcctcggacacatggtcccaggtgccgggccctataccagtacgtgggccaagatgtggacgagctgagcttcaacgtgaacgaggtcattgagatcctcatggaagatccctcgggctggtggaagggccggcttcacggccaggagggccttttcccaggaaactacgtggagaagatctgagctgggccctgggatactgccttctctttcgcccgcctatctgcctgccggcctggtggggagccaggccctgccaatgaaagcctcgtttacctgggctgcaatagcctaaaagtccaatcctttggcctccagtccttgcccaggccctgggtcaccaggtcactggtgcagcccccgcccctgggccctggttttcctccaacatcacacctgctgcccattgtccaaaactgtgtgtgtcaaaggggactaacagcagaatttacctcccaactgccatgtgattaagaaatgggtcttgagtcctgtgctgttggcaaagttccaggcacagttggggagggggggccggaatccgc

SEQ ID NO: 1844 - DNA, 1483 bp, Homo sapien
ggaggaggacgacaatgaagaggaaggggacaggaaaacgggcaagcaggcttttatgggagagcaagagaagttggatgtacatgagaaatctaaggcagataagatgaaagaagggtcagattcttctgtatcctcagaaaaaggaggccggcttcctactcccaagctgagagaacttggtggaatccagaggactcatcatgatctcactactccagctgttggtggtgctgttttagtgtctccatctaagatgaagcctccagccccagaacagaggaaaagaatgacctctcaggattgtttagaaacttcaaagaatgattttactaagaaagaaagtcgtgctgtatccctactgacttctccagctgctggtataaaaacagttgatcctctgcctttgcgggaagattctgaagacaatatccacaaatttgctgaggcaactcttccagtttcaaaaattccaaaatacccaacaaatccccctggacagttgccttctccaccacatgttccatcctactggcatccctctcgacgaattcagggctctcttagagatccagagtttcagcacaatgtgggaaaagcaaggatgaacaatttgcagttacctcaacatgaagcctttaatgatgaagatgaggacagattgtctgagatttctgctcgctctgcagcttctagtctccgggcttttcaaactctggcacgagctaagaaaaggaaggagaatttctggggtaaaacataaacctagctgagttgcctttatctaaggaaacattggcataatttttctttattgcttactgtgttaaaattttttgagtgaagtttttcctaacattttctactttgaaatatttaatttccaatagaacagtttacttggaaattgttaacataggcttatacaaatttaacttttaaagaattctttttacatctatcccagagtacaaagacctagattattgaattcttcacatgtaactttcgtaataggtgtcatggatagattttcacctatccagagagtattctaaaaaaataaacaaagtgaagtaaaagttaagatcccagtgtgaagtatatattcccctaagatttgatatatgtatctttataattgatgatgttgtaaaatgaatttgttgttcctttaacctttgctgtagtgtttctttttattttagttccttctatacatgtttgcagtgttaagataattgtactttgaaaacaccagctgtatatatttttcttatttatgtaacaaagtttgctgaaagatatgtatatttttgatctttgagtgtattctatttgtgtaaggactttggcttacatttgaataatgtctagattttgaaaaattacctgtataatggagaattaaaactttgtagacattttgaaataaaaatggatcaagtgcaaaaaaaaaaaaaaaaaaaaaaaaaaaaaaaaa

SEQ ID NO: 1845 - protein, 253 aa, Homo sapien
EEDDNEEEGDRKTGKQAFMGEQEKLDVHEKSKADKMKEGSDSSVSSEKGGRLPTPKLRELGGIQRTHHDLTTPAVGGAVLVSPSKMKPPAPEQRKRMTSQDCLETSKNDFTKKESRAVSLLTSPAAGIKTVDPLPLREDSEDNIHKFAEATLPVSKIPKYPTNPPGQLPSPPHVPSYWHPSRRIQGSLRDPEFQHNVGKARMNNLQLPQHEAFNDEDEDRLSEISARSAASSLRAFQTLARAKKRKENFWGKT

SEQ ID NO: 1846 - DNA, 1487 bp, Homo sapien
ggcacgagggccgcactgagccacagccccgggggccgcctcccggggccccttgaggcactgaggcaccgagactggttctccccgagagactcggaaggtggggaacgaggggactgtgtttggggaggtggctttttcgtctgctgttgactgaacactacagcgccctgtggttccgggcttcgcacagctgtcccagggatggatcgcctgtgctgccttcgcccgccgccacaccgggaccctgcacggctgcttctggcctcgacagatgacaaaagaaacagccccaaaatacgaccactccaaccagcagttcccgcctgcctgcccgccactgtcaggcctgccctggcctcctcgtccgcagggctgtctgctggcttctgggggcagaagagcggggagccccgtggaagggtcaggggagaccaggtcagggcagctacatttctggtgatcagccccatggggagacggggctggcgggataccgcccccccggcttccccacaccacttctgtctcacccggaagcgtcctttttttgtgccaggtgtctacctaagagggttggtgccagaagccccccatggcgagtgctggggcccggcggtgccctgggggagcagatggggccacccctggcagggccgctacaactttttccagcagcggagccctctggggggcctgtgcttgtggcatctctgagggcccagattgcacaaggtgacctggccgtggcctgagggtggagtcgcccagcacgcaggccggggcgctgcggggctaagtattaggccttcccagggagggggcgtgccaagcatcccagagccgggctgggaccgccaaaacgtcgtggcctggatcctctgggtctgagtgcctgatcccctgccccccaaaaaagcagaggtaggtgttgcaggcccagggcaggggtgcctgccccaggagagtcccaggcagtggttctcgtgccagtggcacccaggggcaaggacagccaacccccacccttgccacgtgtggggccacgtgggcatgtggggtgtgtgtttttaccttggtgaatctcacctgccaacgatttctcgtgagtgccaatgtcccccagtggtggcagcagatcctgtggccggcctggcggacgggacccagtgatacttgtatattacacagtcctgatttcagacaatttcaaccttaatctatttaaaaaagaatattctatacaagctgtttttaagccttttaccatttgaaatgcatgtgttgtgcgcgttggggatgggaggaggggctgaggagcggctcagtgtcacctcccacagccaccggccctgacccttaatccagacaccgatggaagtcgacttttcatatctttctcctgaaatgaactctgttttaaattggaataaattttgttcctaaaaaaaaaaaaaaaaaaaaaaaaaaaaaaaaaaaaaaaaaaa

SEQ ID NO: 1847 - protein, 170 aa, Homo sapien
MDRLCCLRPPPHRDPARLLLASTDDKRNSPKIRPLQPAVPACLPATVRPALASSSAGLSAGFWGQKSGEPRGRVRGDQVRAATFLVISPMGRRGWRDTAPPASPHHFCLTRKRPFFVPGVYLRGLVPEAPHGECWGPAVPWGSRWGHPWQGRYNFFQQRSPLGGLCLWHL

SEQ ID NO: 1848 - DNA, 1445 bp, Homo sapien
attttgtggaatagagttgatcgctgtctcctccgcaaagcattttaactcgaataagcaaatgccgcctctgtttgaacgttttggtatttacaagagagaaatcattttacctaagagaactaattgaattggcagcatccttgaaatacctccggacaaggatctgggggtgggggtggaaaagcaactgcgaaatagcagacggagaaattcctttggaagttattccgtagcataagagctgaaacttcagagcaagttttcattgggcaaaatgggggaacaacctatcttcagcactcgagctcatgtcttccaaattgacccaaacacaaagaagaactgggtacccaccagcaagcatgcagttactgtgtcttatttctatgacagcacaagaaatgtgtataggataatcagtttagatggctcaaaggcaataataaatagtaccatcaccccaaacatgacatttactaaaacatctcagaagtttggccagtgggctgatagccgggcaaacaccgtttatggattgggattctcctctgagcatcatctttcgaaatttgcagaaaagtttcaggaatttaaagaagctgctcgactagcaaaggaaaaatcacaagagaagatggaacttaccagtacaccttcacaggaatccgcaggcggggatcttcagtctcctttaacaccggaaagtatcaacgggacagatgatgaaagaacacctgatgtgacacagaactcagagccaagggctgaaccaactcagaatgcattgccattttcacatagttcagcaatcagcaaacattgggaggctgaactggctaccctcaaaggaaataatgccaaactcactgcagccctgctggagtccactgccaatgtgaaacaatggaaacagcaacttgctgcctatcaagaggaagcagaacgtctgcacaagcgggtgactgaacttgaatgtgttagtagccaagcaaatgcagtacatactcataagacagaattaaatcagacaatacaagaactggaagagacactgaaactgaaggaagaggaaatagaaaggttaaaacaagaaattgataatgccagagaactacaagaacagagggattctttgactcagaaactacaggaagtagaaattcggaacaaagacctggagggacaactgtctgacttagagcaacgtctggagaaaagtcagaatgaacaagaagcttttcgcaataacctgaagacactcttagaaattctggatggaaagatatttgaactaacagaattacgagataacttggccaagctactagaatgcagctaaggaaagtgaaatttcagtgccaattaattaaaagatacactgtctctcttcataggactgtttaggctctgcatcaagattgcacaaaaaaaaaaaaaaaaaa

SEQ ID NO: 1849 - protein, 354 aa, Homo sapien
MGEQPIFSTRAHVFQIDPNTKKNWVPTSKHAVTVSYFYDSTRNVYRIISLDGSKAIINSTITPNMTFTKTSQKFGQWADSRANTVYGLGFSSEHHLSKFAEKFQEFKEAARLAKEKSQEKMELTSTPSQESAGGDLQSPLTPESINGTDDERTPDVTQNSEPRAEPTQNALPFSHSSAISKHWEAELATLKGNNAKLTAALLESTANVKQWKQQLAAYQEEAERLHKRVTELECVSSQANAVHTHKTELNQTIQELEETLKLKEEEIERLKQEIDNARELQEQRDSLTQKLQEVEIRNKDLEGQLSDLEQRLEKSQNEQEAFRNNLKTLLEILDGKIFELTELRDNLAKLLECS

SEQ ID NO: 1850 - DNA, 5611 bp, Homo sapien
gagcctggggaggtcgagggtgcagcgagccgtgatcgtgctactgcactccagcctgggcaacacagagagaccctgtctcaaaacaaacaaacaaacaaacaaacaaacaaaacaaagaaaaaaaaatgggagtgggccgggcgcggtgactcacacctgtaatcccagcactttcggaggccaaggcgggtggatcacgaggtcaggaattcaagattagcctggacaacatggtgaaaccccatctctacgaaaaatacaaaaattagccaagtatggtggccggcgcctgtaatcccagctactcgggagactgaggcagagaactgcttgaacctgggaggcagaggttgcagtgatccgagatcgcgtcactgcactccagcgtgggcgacagagcgagactccgtttcagaaaagaaaaaaaaaaaaaaaaaaaaaagggagtcggggtggagctctcattggctcgttgcatgtgagtgtccctacggcctagaaataccagagaagcacatcggaacgggctggaaatccacccagttaactagagggctttgaaccttttattaacttggaggttgactctcctgtcaactcgattcccttttggctgtttggcagggtcagtgagacatcccctgggtcgctcgaccccgtaggacggttcagggagccctccaggtcttcgtttctcctcttccccgcacagtgctgttatccagctgggggatccaacgcacacttaaggctccagcaaagtggctccgctgccggatgggagtgccccagtgtgctggatgaagctggcgcatgcaccatgtcatcatgtgtctctagccagcccagcagcaaccgggccgccccccaggatgagctggggggcaggggcagcagcagcagcgaaagccagaagccctgtgaggccctgcggggcctctcatccttgagcatccacctgggcatggagtccttcattgtggtcaccgagtgtgagccgggctgtgctgtggacctcggcttggcgcgggaccggcccctggaggccgatggccaagaggtcccccttgactcctccgggtcccaggcccggccccacctctccggtcgcaagctgtctctgcaagagcggtcccagggtgggctggcagccggtggcagcctggacatgaacggacgctgcatctgcccgtccctgccctactcacccgtcagctccccgcagtcctcgcctcggctgccccggcggccgacagtggagtctcaccacgtctccatcacgggtatgcaggactgtgtgcagctgaatcagtataccctgaaggatgaaattggaaagggctcctatggtgtcgtcaagttggcctacaatgaaaatgacaatacctactatgcaatgaaggtgctgtccaaaaagaagctgatccggcaggccggctttccacgtcgccctccaccccgaggcacccggccagctcctggaggctgcatccagcccaggggccccattgagcaggtgtaccaggaaattgccatcctcaagaagctggaccaccccaatgtggtgaagctggtggaggtcctggatgaccccaatgaggaccatctgtacatggtgttcgaactggtcaaccaagggcccgtgatggaagtgcccaccctcaaaccactctctgaagaccaggcccgtttctacttccaggatctgatcaaaggcatcgagtacttacactaccagaagatcatccaccgtgacatcaaaccttccaacctcctggtcggagaagatgggcacatcaagatcgctgactttggtgtgagcaatgaattcaagggcagtgacgcgctcctctccaacaccgtgggcacgcccgccttcatggcacccgagtcgctctctgagacccgcaagatcttctctgggaaggccttggatgtttgggccatgggtgtgacactatactgctttgtctttggccagtgcccattcatggacgagcggatcatgtgtttacacagtaagatcaagagtcaggccctggaatttccagaccagcccgacatagctgaggacttgaaggacctgatcacccgtatgctggacaagaaccccgagtcgaggatcgtggtgccggaaatcaagctgcacccctgggtcacgaggcatggggcggagccgttgccgtcggaggatgagaactgcacgctggtcgaagtgactgaagaggaggtcgagaactcagtcaaacacattcccagcttggcaaccgtgatcctggtgaagaccatgatacgtaaacgctcctttgggaacccattcgagggcagccggcgggaggaacgctcactgtcagcgcctggaaacttgctcaccaaaaaaccaaccagggaatgtgagtccctgtctgagctcaaggaagcaaggcagcgaagacaacctccagggcaccgacccgccccccgtgggggaggaggaagtgctcttgtgagaggcagtccctgcgtggaaagttgctgggcccccgcccccggctcccccgcacgcatgcatccactgcggccggaggaggccatggagcccgagtagctgcctggatcgctcgacctggcatgcgcgccgcgtcgcctctggggggctgctgcaccgcgtttccatagcagcatgtcctacggaaacccagcacgtgtgtagagcctcgatcgtcatctctggttatttgttttttcctttgttgttttaaaggggacaaaaaaaaaaaaaaaaggacttgactccatgacgtcgaccgtggccgctggctggctggacaggcgggtgtgaggagttgcagacccaaacccacgtgcattttgggaaattgctttttaaaagatttttatgccaaaaatccttcattgtgattttcagaaccacgtcagatataccaagtgactgtgtgtggggtttgacaactgtggaaaggcgagcagaaaactccgggggtctgaggccatggaggtggttgctgcatttgagagggagtagggggctagatgtggctcctagtgcaaaccggaaaccatggcaccttccagagccgtggtctcaaggagtcagagcagggctggccctcagtagctgcagggagctttgatgcaacttatttgtaagaaggatttttaaattttttatgggtagaattgtagtcaggaaaacagaaagggcttgaaatttaataagtgctgctggaaggggattttccaagcctggaagggtattcagcagctgtggtggggaaacatttctcctgaaagactgaacgtgtttcttcatgacagctgctcaaagcaggtttctgagatagctgaccgagctctggtaaatctctttgtcaaattacgaaaacttcagggtgaaatcctatgctttcatgtacattacatggcttaagattaaacaaaaacatttttcaagtctctaactagagtgaactctagagcacagtagttcagaaactatttagagcttccaggatatatttcacagcttcaggcatgtgatcagttagagccgatgaaacctatgcccgcctgtatatatattagcagcttagctagttcataacctgtatattctaaagactgctaaggttttgttttcattttaaatcctagctgattgttgtggtcaatgaaatacccagtttctgaagggccaggtgggaaatgctttcactggaccaacacacaaatgatcatcctgaggatctgagcttccctagactccacacaataaccttggggcacccttttagagaagactgttgaaacccacagcactcgttggggtatgaggaaaccagggcttggcacaggaagttcccctttgtagctaaaagtccagaaagaaagggttcatctttttgacttccaactgatattgggaagtttggttgaggttcaagtgtgactccttccagagccacaggtaggggagtgtgaagttgagggggaggaaagctggaaggactctgccttgggagattcccagctctgctttccagcgcttggtggaatctgggctggggaaagacggcaccgggaaactctgcttccccattgtttccatctgatcagctgtggtgtgaggacttctcagacaaaggcaaggcctcgtgcccctgcccagcccattcatggagccctgggccttcttggcttccatagatcctaagctcttgactgtagtttagccagacttgttttgctatcttataagcagttcagaattagggaatgctggttttgaagagcaaaggacaggtagtctagagagggtcgtctggcctgcttgctgggtctttgtaacccagcacttcctcttgccctcctggctttatgtttatgggagaggactcaatagctccaccccttctggcaccagatggggcttggttagtttgcaataagcaccttgcagaggttaaagccagcgggtccctagtcttaggcccagcctgcttgtgtgggctctggcctggcctggtggctggcccagggggcagcagtgcttagagcttctgcagggcttctcttgtttacacagctgcatcagacaatgccatttctccccaccacggaaccttccatctaagatttcttccagggaatgccagcaatcaggcagcacccagctgtgggggcagtggggtgggggagacccacattgatgactttttttttttcttttaatgaagaaacaccaaagaaagctgtggaaaggacctgccccacatgaaaaggataagccaagatggctgtaaacacagagcatttgagctgccactcttggagcacattgatttttcaaaagccagctctgtcaggaaaggaggtgctgttatgacagctcttccagtgggcaaagaggacgcccataatttcttccattgctagctcatctgtgggaccaatttggtgtaagcaacctgtggcctgcacttgtggcctcgaaggaagcacaaaccctccatccacttcccatttcctctgcccttttccacctcccccttccatcccaccagctgccagtggctcccagaaagccttattgagccccttgttgacacttggggctgcggaggcctttccctactggtctggcctttcctgagaggcaggtcttccgtcctcagagcctttctggaacaaggagaatgcctgtgcaggtggacacacaggcctggcctgtcgctctcacttgtcttccagcggggagcttcacgttgccgagtggaagaaccatgacctccacttgcttccaaggtgctagggaagtttcagggtacgctggttcccctctccagctggaggccgagtttctggggactgcagatttttctactctgtgatcgattcaatgcccgatgcttctgtttcattcccgaccctttctactatgcattttccttttatcaggtgtataaagttaaatactgtgtatttatcactaaaaagtacatgaacttaagagacaactaagcctttcgtgtttttccacaggtgtttaagcttctctgtacagttgaaataaacagacagcaaaatggtaaaaaaaaaaaaaaaaaaa

SEQ ID NO: 1851 - protein, 588 aa, Homo sapien [sequence omitted]

SEQ ID NO: 1852 - DNA, 3461 bp, Homo sapien
ggacacctcaaagatgaagtcagataagctggcagtgacctgattaacgttgtggtaagcagatgccactgtggctgggaagtaccaaatcttctgttgagtgattcagtcttcctgactagatttgccttctagtgggtgtattaataagcgttagttgatatgaattaaatgttgcaactttctatgggtaataagaggatacctttatagtttcatgatgtggagaccaagatacataagaaagcaagaatgagtctccgggtgttccctctgatcagcaaacatgaattcataatttcatttactctcatttttgtaatgcactctgagcaatcctccaggcagatcctatttactaagcttcaggcttttgtcccattttataatgcccaaacacatggagaaaacattttgttgtttttaaaaacaggtatgggatttctgatataatcaattttattgacttcttgggagttgtaatgatctgtgactcactgcataatattgtagttttatagggtggcacatcaccctgtgtaaaacaactttaatgacctgaggactgatgagtacaggaagtgaggtttatcatgagtagcatttattaagcatctgctagaatcaaagcactgcattagctactaaggtacaaagtaagacacagtttaataaggaagacagggcatctacccaagtcaacagttcagtgacatctgttatttgaaccacacaccaatgcaaccgaagtaaatgctgaaagggtgagaagaaggaatagattactatgcatttttgagaggatgaagaaggcttcttggagaaggtttctgaaaagagatacggaattaagagaatagaaaagagcactgacgaagcactcaggatggctattcaaggaattggggatccacagcagctgtgcacaaccatccctaatgccagaaaaatggggtaagggtgaagggaactgggtctagagctttgcatgtttttttctggttaacccttagagtcaccctgaaggtgtggatcccatcttataataaggtgaggacactgagtcaggaaactaacttgctaaaatcaagtcctcccagtcctcccatcaggtccttccagatctggaggagccaggatttgaactcacatttgtctgacttcaaaatccatgctttttcttgtgttccaaattgcacaatggagtcactgccagttcaagctcctatgaaaagggatggatgtgaaaagtcatttgttgattccacagatttttagtaggtaccatgtctcctgcctttatcactatcctactcctctgctacaacttctctgctacaggcacccactgcagttacttgatatgagttaaatgaatccatccatccaaacttccattcattgaataaatacttagcaatggcttcctttgtatcaggcactattctaggagctggggctacagtgccagatggaaaccagcaaagctcactgccctcatggagcttatatgtgagtgaataaatctcagggtggttctcctgtcataggtcctggctcctctgccagctcttccaaatgggttcagagaggttttctccttgtcctgttgtgtaactgataatcccatggtggacctcactttgctattcatatgcactaagtagtttatggtgtgctttgtggctggcaattgtgacagattctattcttctattggtatgtggtttctttggggcatttgtttggatactgatggcatcttccgggggtctgaggcacctacacaaacctcaggtcactatcacgtgatactggagttgcctgttaaattatatttcttcttccacaaaactgcaggttccctgagggaaaggtctatgtcctgctcatttttggatccctaatggctggcacagtacctggtgcataatatggttcaacaaatatttgtaaaatgaatgaatcaaatagtccttcaaagcatcttcagaatcaagattgtcatctagattgcacccgaagtttatctttctagtattcagaatataatcaatcattgcttaaattattccatttcatcattcttgaataaaagctactaattttaaatactaatatctgagatatcttcgaaaagaagattagtcgttgtatgtgttgcttataaattttctctatggtggaaaatattcccaaaccatgtctaagcaatgaaaaaccagtgttctggcaggaaataaactgatgtttgttgtgttttgtatctgtcttcccgttccaaatcatttatatatacttgatggtctgtgggcttgacttgcaagtattttcctgggagacatttttattcaaaagacctgtattgcctgccaaaccttcatttaagagactcattatggatgtcatctgcatcattgcaaacttttctggtcgtctctataaatagcaagataatatttacagagttttacattggctcttgaattttaaaatattcttatagacaaacattaattggaatggggggtaaggaggtaggaatggcttacttgcggaaatgcaggctcattgttgtgtctagtaggtgctaggtgcattcacacatctcttaagctttaaacaacctattgagccggtttccatttccttgatctattagatttaaaaaaatgaagcataaaggagttggctcttgccctaagtcatactactgatggaatgagaatacaaaccaaaaacactttattcaagtccaggaaatatctgccttgaaaaagaataacttaaaaattaaaagtgtcctctatttgaacatgaaaacagctaataaagatgtgttattttattttattattattaattttgtcctcccatattggcaaagataaagcaattgacaaaaatggaattcttgttcaatactggcaggagtgaaaattggtagaacctttctagaaggcaatttggcaacatgtatgaaaacctaaatgttgatacacctttacccagcagtttgtttaggaatttatcctaatgaataaaagttgtccaagtcttcaaacatgagcccaaaggtatatttcatgatgtttatgatattaaaacattggaaacaactgaaacatccttcagtaaaagatggattaaataaattccatgcagttgtcatttaaaaatatttagatatatgtttattgctatggatatatgttcccaaaatattattgaatcaaaaagtagactacaggatatatgttgaatatgagctcatttataacattgaatattttaagataatgtatgtttcatagagagatcttcaccaaatgttaaggatttttttttctgggctgtggtatttgggtgatctttacattcttcagactcatgtgtgtttgaaactttttataatgaacatatatcatttttattagaaaagaataaagtttttgaaaaaa

SEQ ID NO: 1853 - protein, 13 aa, Homo sapien
DTSKMKSDKLAVT

SEQ ID NO: 1854 - DNA, 7006 bp, Homo sapien
gtttgtcgcagcaagaacaaacagcattccttccagcaaatcaagtgcctgttttacaacagaacacttcagttgctgcaaaacaaccccagacttctgtggtacagaatcaacaacagatatcacaacagggacctatatatgatgaagtggaattggatgcattggctgaaattgagcgaatagagagagaatcagctattgaaagggagcgcttctcaaaagaagttcaagataaagataagcctttgaaaaaaagaaaacaagattcttacccacaggaggctgggggtgctacaggaggtaatagaccagcttctcaggagacgggttctacgggaaatgggtcaaggccagcattaatggttagcattgatcttcatcaggcaggaagagtggactctcaggcttctataactcaggattcagactccataaaaaagcctgaagaaatcaaacaatgtaatgatgcacctgtttctgttcttcaggaagatattgttggaagtcttaaatctacaccagaaaaccatcctgagacacctaaaaaaaagtctgatcctgagctttcaaagagtgaaatgaaacaaagtgaaagtagattagcagaatctaaaccaaatgaaaaccgattggtggagacaaaatcaagtgaaaataagttagaaactaaagttgagacccaaacagaagaacttaaacagaatgagagcagaacaactgaatgcaaacaaaacgagagcaccatagttgagcctaaacaaaatgaaaatagactgtctgacacaaaaccaaatgacaacaaacaaaataatggcagatcagaaacaacaaaatcaaggcctgaaaccccaaagcaaaagggtgaaagccggcctgagactccaaaacaaaagagtgatgggcatcctgaaaccccaaaacagaagggtgatggaaggcctgaaactccaaagcaaaaaggtgagagccgccctgaaactccaaagcaaaaaaatgaagggcgacctgaaacaccaaaacacaggcatgacaataggagggattctggaaagccatctacagagaaaaaacctgaagtgtctaaacataaacaagatactaaatctgactcacctcggttaaaatcagaacgagctgaagccttaaagcagagacctgatgggcgatctgtttctgagtcactaagacgtgaccatgataataaacaaaaatcagatgacaggggtgaatcagagcgacatcgaggggatcagtctagggttcgaagaccagaaacattgagatcctctagtagaaatgaacatggcattaaatctgatagttcaaaaactgataaactagaacgaaaacacaggcatgaatcaggggactcaagggaaagaccatcttctggggaacaaaaatcaagacctgacagtcctcgtgttaaacaaggagattctaataaatcaagatctgataaacttggttttaaatcaccaactagtaaagatgacaaaaggacagagggtaacaagagtaaagtagacactaataaagcacaccctgacaataaggcagaatttccaagttatttgttggggggcaggtctggtgcgttgaaaaattttgtcattccgaaaatcaagagggataaagatggcaatgttactcaggagacaaagaaaatggaaatgaaaggagagccgaaagacaaagtagaaaaaataggattagttgaagatctaaataaaggagctaagcctgtagttgtgctacaaaaactgtctttggatgatgttcagaaacttattaaagatagagaggacaaatcaagaagttcccttaaacctatcaagaataaaccatcaaagtcaaataaaggtagtatagatcaatcagtgttaaaagaattaccccctgaactcctggcagaaattgagtccaccatgccactttgtgaacgtgtgaaaatgaacaaacgcaagcgtagcacagttaatgaaaagccaaaatatgctgaaatcagttcagatgaagataatgatagtgatgaagcttttgaatcctctaggaaacgacataaaaaagatgatgataaagcttgggaatatgaagagcgtgacagaagaagctctggggatcataggagaagtggccactctcatgaaggaagaaggagttcaggtggtggtcgttatcgaaaccgaagtccgtcagattctgacatggaagattattctcctcctcccagccttagtgaggttgctaggaaaatgaagaaaaaagaaaaacagaagaaaaggaaagcatatgaaccaaaactaacacctgaagaaatgatggactcttcaacttttaagagattcacagcctcaatagagaatattttggataatttggaagatatggattttactgcgtttggtgatgatgatgaaattcctcaggaactgctcttaggaaaacatcagcttaatgaacttggcagtgaatctgctaaaataaaagcaatgggtataatggataagctttcaactgacaaaactgtgaaagtcttaaatatcttggagaagaatattcaggatgggtcaaagctttccactttgttaaatcataataacgatactgaagaagaagaaaggttatggagagaccttattatggagagagttacaaaatcagcggatgcttgtcttacaactatcaacattatgacatcccctaacatgccaaaagctgtgtacattgaggatgtaattgaaagagttatacagtacactaaatttcatttgcagaatacactttatcctcagtatgatcctgtttacagattagatcctcatggaggaggcttattaagttcaaaagcaaaacgggctaaatgttctacccataagcagagagtaatagtaatgctttataacaaagtttgtgacattgttagcagcttatcagaattgctagagatacaacttcttacagacacaacaattcttcaggtttcatctatgggaataacaccattttttgtggaaaatgtcagtgaactacagttgtgtgccattaagttagtcactgcagtattctcaagatatgaaaaacataggcagttaattttggaagaaatttttacttcacttgcaagattaccaaccagcaagaggagtttaaggaacttcaggttaaacagtagtgatatggatggagaacctatgtatattcagatggttacagcactggttttacaacttattcagtgtgtggtacacttaccatcatcagagaaggactctaatgcagaagaagattcaaataaaaaaattgaccaggatgttgtcattactaactcttatgaaacagctatgcgaacagcccaaaacttcctctccatcttccttaaaaaatgtggtagtaagcaaggtgaagaagattacagaccactgtttgaaaattttgttcaagaccttctttcaacagtcaataagcctgaatggccagctgctgaactactccttagtttgttagggagactgttggttcatcagttcagtaacaagtcaacagagatggctttaagagtggcatctcttgattaccttggaactgttgctgcacggctaagaaaagatgctgttacaagcaaaatggatcaaggatctatagaacgcattttaaaacaggtttcaggaggggaagatgaaatccaacaattacaaaaagcattgcttgattacttggatgaaaacactgagactgatccttcactagtgttttctcgtaaattctatatagcccagtggtttcgagacacaactctggaaacagaaaaagcaatgaaatcacaaaaagatgaagaatcatctgaaggaacacatcatgcaaaggaaattgagacaactggccaaattatgcatcgagctgaaaaccgaaaaaagtttcttagaagcattatcaaaaccacaccttctcagtttagcacattaaagatgaactctgatactgtggactatgatgatgcttgcttgattgttcgatacttggcctccatgaggccgtttgcccagagctttgatatttatttgacacagatcctacgagttcttggtgaaaatgcaattgctgttcgaacaaaagccatgaagtgtttgtctgaggttgttgctgtagaccccagtattctagcaaggcttgatatgcaacgaggtgttcatggacgattgatggataattcgactagtgtccgagaagcagcagtagaattactaggtcgatttgtcctttgtcgacctcagcttgctgaacagtattatgatatgctgattgaaagaatattggatactggtatcagtgtcaggaaaagagtaataaagattctcagagacatttgtattgaacaaccaacatttccaaaaatcacagaaatgtgtgtaaaaatgattcgcagagtcaatgatgaagagggcattaagaaattagtaaatgaaacattccagaaactctggtttactccaactccacacaatgacaaagaagcaatgacaaggaaaattttaaacattaccgatgtggttgcagcatgcagagatactggatatgactggtttgagcaactgcttcaaaacttgttgaagtccgaagaggattcctcatataaacctgtgaagaaagcttgtactcaacttgttgataacctagttgagcacattcttaaatatgaggaatctctagctgactctgacaataaaggtgtgaattctggaagattggtagcttgcataaccactttgttcttattcagcaaaataagaccccagctcatggttaaacatgcaatgactatgcaaccataccttaccactaaatgtagtacgcaaaatgatttcatggttatctgcaatgttgcaaaaatcctagagctagttgtaccactgatggagcatccaagtgaaacttttcttgccactattgaggaagatctaatgaagctcatcatcaaatatggcatgactgtagtgcaacattgtgtgagctgtcttggagctgttgtaaataaagtgacacaaaattttaaatttgtgtgggcttgtttcaatagatactatggtgccatttcaaaattaaaaagtcaacaccaagaggacccaaataacacttcacttctaacaaacaaaccagcacttcttagatcccttttcaccgttggagcactatgtcggcattttgattttgatctggaagattttaaaggcaacagcaaggttaacataaaagataaagtacttgaactattgatgtattttacaaaacactcagatgaagaagtacaaacaaaagctatcattggtctaggatttgcctttattcagcatccaagtctaatgttcgagcaagaagtgaagaatctatataataatattttatctgataagaactcctcagtcaatttaaaaatacaagtgttaaaaaacctccagacctacctacaagaagaagatacacgtatgcagcaggcagatagagactggaagaaagttgcaaaacaggaagacttaaaagaaatgggtgatgtttcctcagggatgagtagttccatcatgcagctttatctcaaacaggtgcttgaggcattttttcacacccagtcaagtgtacgccactttgccctaaatgtcattgcattgactctaaatcaaggtcttattcatccagttcagtgtgtgccatatttaattgctatgggcacagacccagaacctgctatgcggaacaaggctgatcagcaacttgtggaaatagacaaaaaatatgctggattcattcatatgaaagcagtggctggtatgaagatgtcttaccaggtacaacaggcaatcaacacatgcctaaaagatcctgtaaggggtttcagacaagacgagtcctctagcgctttgtgttcacacctttactccatgatccgtggaaaccgccaacacagacgagcctttcttatttctttactcaacctctttgatgacacagcaaaaacagacgtgactatgctcttgtatatagcagacaatctagcctgttttccataccagacacaggaagagccgttgtttataatgcatcatatagacattacactctcagtttctggtagtaacctactgcagtcattcaaggagtctatggtaaaggacaaaaggaaagagagaaaatcatcacctagtaaggaaaatgagtcaagcgacagtgaagaagaagtttccaggcctcggaagtcacggaaacgtgtagattcagattcagattcagattcagaagacgatataaattcagtgatgaaatgtttgccagaaaattcagctcctttaatcgaatttgcaaatgtgtcccagggtattttattacttctcatgttaaaacaacatttgaagaatctttgtggattttctgatagtaaaattcagaagtactctccatctgaatctgcaaaagtatatgataaagcgataaaccgaaaaacaggagttcattttcatccaaaacaaacactggacttcctgcggagtgacatggctaattccaaaatcacagaagaggtgaaaaggagtatagtaaaacagtatctagatttcaaacttctcatggaacatctggaccctgatgaagaagaagaagaaggggaggtttcagctagcacaaatgctcggaacaaagcaattacctcactgcttggaggaggcagccctaaaaataatacagcagcagagacagaagatgatgaaagtgatggggaggatagaggaggaggcacttcaggggtgaggcggaggaggagtcaacgtatttcgcagcgtattacgtaaaatgatttttatgtgcttatatatgtcagtctattaaatgtacaccaagtaatgtaatacttaaaagagaaaacattttgtagatagagattctctacttacccgtttatacatccttttgtagaaagtttaacataaaagacaataaaaaaacagaaatgagattt

SEQ ID NO: 1855 - protein, 2265 aa, Homo sapien
MVSIDLHQAGRVDSQASITQDSDSIKKPEEIKQCNDAPVSVLQEDIVGSLKSTPENHPETPKKKSDPELSKSEMKQSESRLAESKPNENRLVETKSSENKLETKVETQTEELKQNESRTTECKQNESTIVEPKQNENRLSDTKPNDNKQNNGRSETTKSRPETPKQKGESRPETPKQKSDGHPETPKQKGDGRPETPKQKGESRPETPKQKNEGRPETPKHRHDNRRDSGKPSTEKKPEVSKHKQDTKSDSPRLKSERAEALKQRPDGRSVSESLRRDHDNKQKSDDRGESERHRGDQSRVRRPETLRSSSRNEHGIKSDSSKTDKLERKHRHESGDSRERPSSGEQKSRPDSPRVKQGDSNKSRSDKLGFKSPTSKDDKRTEGNKSKVDTNKAHPDNKAEFPSYLLGGRSGALKNFVIPKIKRDKDGNVTQETKKMEMKGEPKDKVEKIGLVEDLNKGAKPVVVLQKLSLDDVQKLIKDREDKSRSSLKPIKNKPSKSNKGSIDQSVLKELPPELLAEIESTMPLCERVKMNKRKRSTVNEKPKYAEISSDEDNDSDEAFESSRKRHKKDDDKAWEYEERDRRSSGDHRRSGHSHEGRRSSGGGRYRNRSPSDSDMEDYSPPPSLSEVARKMKKKEKQKKRKAYEPKLTPEEMMDSSTFKRFTASIENILDNLEDMDFTAFGDDDEIPQELLLGKHQLNELGSESAKIKAMGIMDKLSTDKTVKVLNILEKNIQDGSKLSTLLNHNNDTEEEERLWRDLIMERVTKSADACLTTINIMTSPNMPKAVYIEDVIERVIQYTKFHLQNTLYPQYDPVYRLDPHGGGLLSSKAKRAKCSTHKQRVIVMLYNKVCDIVSSLSELLEIQLLTDTTILQVSSMGITPFFVENVSELQLCAIKLVTAVFSRYEKHRQLILEEIFTSLARLPTSKRSLRNFRLNSSDMDGEPMYIQMVTALVLQLIQCVVHLPSSEKDSNAEEDSNKKIDQDVVITNSYETAMRTAQNFLSIFLKKCGSKQGEEDYRPLFENFVQDLLSTVNKPEWPAAELLLSLLGRLLVHQFSNKSTEMALRVASLDYLGTVAARLRKDAVTSKMDQGSIERILKQVSGGEDEIQQLQKALLDYLDENTETDPSLVFSRKFYIAQWFRDTTLETEKAMKSQKDEESSEGTHHAKEIETTGQIMHRAENRKKFLRSIIKTTPSQFSTLKMNSDTVDYDDACLIVRYLASMRPFAQSFDIYLTQILRVLGENAIAVRTKAMKCLSEVVAVDPSILARLDMQRGVHGRLMDNSTSVREAAVELLGRFVLCRPQLAEQYYDMLIERILDTGISVRKRVIKILRDICIEQPTFPKITEMCVKMIRRVNDEEGIKKLVNETFQKLWFTPTPHNDKEAMTRKILNITDVVAACRDTGYDWFEQLLQNLLKSEEDSSYKPVKKACTQLVDNLVEHILKYEESLADSDNKGVNSGRLVACITTLFLFSKIRPQLMVKHAMTMQPYLTTKCSTQNDFMVICNVAKILELVVPLMEHPSETFLATIEEDLMKLIIKYGMTVVQHCVSCLGAVVNKVTQNFKFVWACFNRYYGAISKLKSQHQEDPNNTSLLTNKPALLRSLFTVGALCRHFDFDLEDFKGNSKVNIKDKVLELLMYFTKHSDEEVQTKAIIGLGFAFIQHPSLMFEQEVKNLYNNILSDKNSSVNLKIQVLKNLQTYLQEEDTRMQQADRDWKKVAKQEDLKEMGDVSSGMSSSIMQLYLKQVLEAFFHTQSSVRHFALNVIALTLNQGLIHPVQCVPYLIAMGTDPEPAMRNKADQQLVEIDKKYAGFIHMKAVAGMKMSYQVQQAINTCLKDPVRGFRQDESSSALCSHLYSMIRGNRQHRRAFLISLLNLFDDTAKTDVTMLLYIADNLACFPYQTQEEPLFIMHHIDITLSVSGSNLLQSFKESMVKDKRKERKSSPSKENESSDSEEEVSRPRKSRKRVDSDSDSDSEDDINSVMKCLPENSAPLIEFANVSQGILLLLMLKQHLKNLCGFSDSKIQKYSPSESAKVYDKAINRKTGVHFHPKQTLDFLRSDMANSKITEEVKRSIVKQYLDFKLLMEHLDPDEEEEEGEVSASTNARNKAITSLLGGGSPKNNTAAETEDDESDGEDRGGGTSGSLRRSKRNSDSTELAAQMNESVDVMDVIAICCPKYKDRPQIARVVQKTSSGFSVQWMAGSYSGSWTEAKRRDGRKLVPWVDTIKESDIIYKKIALTSANKLTNKVVQTLRSLYAAKDGTSS

SEQ ID NO: 1856 - DNA, 449 bp, Homo sapien
ttttttaattaggataatgcctttattaacgagaatgaaacgttcattcctccttccactccttctcgttggttttctggacacagctcacctgatcctgctagaaacgttgtcagtctgcttgtggcttccctccttgattgactcacgctgtgtgatgtcttgagaagtatctatccacttcatgtgaatgagcactccaatatcagccaacatcaatcattcttaccatgtcacttcccatcatggaaccactcatggttgctggtggaacgccaggattagcttcataacctatgccaccaccacctcctagaggtggaaatttctggcctcctgaaccatagggatctcccatgttcattgctcctccgccacccattcgcatgtctctttcccgtggatccatgtagcccattcggctgtaactttcctctctttggcgcctc

SEQ ID NO: 1857 - protein, 54 aa, Homo sapien [sequence omitted]

SEQ ID NO: 1858 - DNA, 647 bp, Homo sapien
gctcactgagcaccgtcccagcatccggacaccacagcggcccttcgctccacgcagaaaaccacacttctcataccttcactcaacacttccttccccaaagccagaagatgcacaaggaggaacatgaggtggctgtgctgggggcaccccccagcaccatccttccaaggtccaccgtgattaacatccacagcgagacctccgtgcccgaccatgtcgtctggtccctgttcaacaccctcttcttgaactggtgctgtctgggcttcatagcattcgcctactccgtaaagtctagggacaggaagatggttggcgacgtgaccggggcccaggcctatgcctccaccgccaagtgcctgaacatctgggccctgattctgggcatcctcatgaccattggattcatcctgttactggtattcggctctgtaacagtctaccatattatgttacagataatacaggaaaaacggggttactagtagccgcccatagcctgcaacctttgcactccactgtgcaatgctggccctgcacgctggggctgttgcccctgcccccttggtcctgcccctagatacagcagtttatacccacacacctgtctacagtgtcattcaataaagtgcacgtgcttgtga

SEQ ID NO: 1859 - protein, 125 aa, Homo sapien
MHKEEHEVAVLGAPPSTILPRSTVINIHSETSVPDHVVWSLFNTLFLNWCCLGFIAFAYSVKSRDRKMVGDVTGAQAYASTAKCLNIWALILGILMTIGFILLLVFGSVTVYHIMLQIIQEKRGY

SEQ ID NO: 1860 - DNA, 928 bp, Homo sapien
atcagacagaaggggatttcagtttgcaaataatgagcaatgtagcaattttaacacatttcataaatatatattttgtcattggtggagagcaccatttgttgttttgaatatactttaaaggaagaggtacaaggacataaatgttgagattacctacaggatggaaatagcagtacagttcattgtagatattttgaaatgtttttgattgttttatataacctagagtgacttcccttacccttatttagatctgcatatatagttctagtatgaagtttaatagttaaggagttagctatttgttatctttaagagtagggtattgacgtgaacaattgcagtattttgcatgatactgttttatagatgaccttttaggaaagtggtgcatttattaattgaactgaagaagtagttcagttgaattcagtatcataattcacaaattggaggctgttgattttgattcatttaaggtttaaaatctttattaattgcaaacagtgcaattatttatacttcacagtgccttcccagaccttccaccttaggttctgctgcaaaaagcaccagtgctgaagatgctgcaagcaccaaatcatagctcataaaatcaggtcctgagatagttacccataaagaggaatcctttgagtgtatgccattggtgagccgatgagcatggaccatagaagggctcaatgtagaagaaactacccgtgtgtaaaaagaagattggcttaaaatggctactgtgatgggaacagtgtcttagggagatgcagcttggacttgaggtaaattgaatactttacaactgtggtttagagtttgctttaatgacattgtatgtaaaaggtcacatgattgctgtaattttgtattcattatggtttcctcaataaatgtacattgatgacta

SEQ ID NO: 1861 - protein, 39 aa, Homo sapien
SDRRGFQFANNEQCSNFNTFHKYIFCHWWRAPFVVLNIL

SEQ ID NO: 1862 - DNA, 5676 bp, Homo sapien
ggatccttgagggcactggtgcgactttcaggtgaggtcttagcagatgaaagcggctggctgtggcccgcgccagtagtgctttctgctccgcactcgccgtgagccaggtgtgcaaccggatttggggcgagggtcgcgctggctacctcgcatgcgcagagccggaagcccgctgaccggactacagctcccagaagagccttgtggaggccgcagacgcgaagccgctggcgccatcttgaaatctgatcctccatccccgaggctttgcgtctgcgcggccggccgctgctgctccgggagcccagtctgctaaaaggggaggacgttgaggacgcggcggctggcgggagagacagctggggagagacatggcagggtcggagcgcggcctgcgcctctgtcactcagcatcctcttaggcgtttccacgcccgccccctgcccgaggggcggggctgacggctctggtacccggagtcggcgcgcggggcaggggcgcgcccctgcagagtggggaccccactgggctgtgccatgctgaccggagaccaccgaggcgggagacagagcgcggcgaagagccattgagtggtcacccagtagccgccgccgccgccgcctcgggaagcttgccacccgctaggagggaagatgaaggagatttgcaggatctgtgcccgagagctgtgtggaaaccagcggcgctggatcttccacacggcgtccaagctcaatctccaggttctgctttcgcacgtcttgggcaaggatgtcccccgcgatggcaaagccgagttcgcttgcagcaagtgtgctttcatgcttgatcgaatctatcgattcgacacagttattgcccggattgaagcgctttctattgagcgcttgcaaaagctgctactggagaaggatcgcctcaagttctgcattgccagtatgtatcggaagaataacgatgactctggcgcggagatcaaggcggggaatgggacggttgacatgtccgtcttacccgatgcgagatactctgcactgctccaggaggacttcgcctattcagggtttgagtgctgggtggagaatgaggatcagatccaggagccacacagctgccatggttcagaaggccctggaaaccgacccaggagatgccgtggttgtgccgctttgcgggttgctgattctgactatgaagccatttgtaaggtacctcgaaaggtggccagaagtatctcctgcggcccttctagcaggtggtcgaccagcatttgcactgaagaaccagcgttgtctgaggttgggccacccgacttagcaagcacaaaggtacccccagatggagaaagcatggaggaagagacgcctggttcctctgtggaatctttggatgcaagcgtccaggctagccctccacaacagaaagatgaggagactgagagaagtgcaaaggaacttggaaagtgtgactgttgttcagatgatcaggctccgcagcatgggtgtaatcacaagctggaattagctcttagcatgattaaaggtcttgattataagcccatccagagcccccgagggagcaggcttccgattccagtgaaatccagcctacctggagccaagcctggccctagcatgacagatggagttagttccggtttccttaacaggtctttgaaacccctttacaagacacctgtgagttatcccttggagctttcagacctgcaggagctgtgggatgatctctgtgaagattatttgccgctccgggtccagcccatgactgaagagttgctgaaacaacaaaagctgaattcacatgagaccactataactcagcagtctgtatctgattcccacttggcagaactccaggaaaaaatccagcaaacagaggccaccaacaagattcttcaagagaaacttaatgaaatgagctatgaactaaagtgtgctcaggagtcgtctcaaaagcaagatggtacaattcagaacctcaaggaaactctgaaaagcagggaacgtgagactgaggagttgtaccaggtaattgaaggtcaaaatgacacaatggcaaagcttcgagaaatgctgcaccaaagccagcttggacaacttcacagctcagagggtacttctccagctcagcaacaggtagctctgcttgatcttcagagtgctttattctgcagccaacttgaaatacagaagctccagagggtggtacgacagaaagagcgccaactggctgatgccaaacaatgtgtgcaatttgtagaggctgcagcacacgagagtgaacagcagaaagaggcttcttggaaacataaccaggaattgcgaaaagccttgcagcagctacaagaagaattgcagaataagagccaacagcttcgtgcctgggaggctgaaaaatacaatgagattcgaacccaggaacaaaacatccagcacctaaaccatagtctgagtcacaaggagcagttgcttcaggaatttcgggagctcctacagtatcgagataactcagacaaaacccttgaagcaaatgaaatgttgcttgagaaacttcgccagcgaatacatgataaagctgttgctctggagcgggctatagatgaaaaattctctgctctagaagagaaagaaaaagaactgcgccagcttcgtcttgctgtgagagagcgagatcatgacttagagagactgcgcgatgtcctctcctccaatgaagctactatgcaaagtatggagagtctcctgagggccaaaggcctggaagtggaacagttatctactacctgtcaaaacctccagtggctgaaagaagaaatggaaaccaaatttagccgttggcagaaggaacaagagagtatcattcagcagttacagacgtctcttcatgataggaacaaagaagtggaggatcttagtgcaacactgctctgcaaacttggaccagggcagagtgagatagcagaggagctgtgccagcgtctacagcgaaaggaaaggatgctgcaggaccttctaagtgatcgaaataaacaagtgctggaacatgaaatggagattcaaggcctgcttcagtctgtgagcaccagggagcaggaaagccaagctgctgcagagaagttggtgcaagccttaatggaaagaaattcagaattacaggccctgcgccaatatttaggagggagagactccctgatgtcccaagcacccatctctaaccaacaagctgaagttacccccactggccgtcttggaaaacagactgatcaaggttcaatgcagataccttccagagatgatagcacttcattgactgccaaagaggatgtcagcatacccagatccacattaggagacttggacacagttgcagggctggaaaaagaactgagtaatgccaaagaggaacttgaactcatggctaaaaaagaaagagaaagtcagatggaactttctgctctacagtccatgatggctgtgcaggaagaagagctgcaggtgcaggctgctgatatggagtctctgaccaggaacatacagattaaagaagatctcataaaggacctgcaaatgcaactggttgatcctgaagacataccagctatggaacgcctgacccaggaagtcttacttcttcgggaaaaagttgcttcagtagaatcccagggtcaagaaatttcaggaaaccgaagacaacagttgctgctgatgctagaaggactagtagatgaacggagtcggctcaatgaggccttacaagcagagagacagctctatagcagtctggtgaagttccatgcccatccagagagctctgagagagaccgaactctgcaggtggaactggaaggggctcaggtgttacgcagtcggctagaagaagttcttggaagaagcttggagcgcttaaacaggctggagaccctggccgccattggaggtgcagctgcaggggatgacaccgaagatacaagcactgagttcactgacagtattgaggaggaggctgcacaccatagtcaccagcaactatagcttcagaagcatttttacttgcaagacgatggacacattccccttgggctttttgtaactgaaacgcaccacagaagacagggagtcatcgaagggctgctcggggaggtggcagggcggaggacctgcttgggaagaaactccaagaagattggaatgcttccaaagcaagaatctttctcagtgaaatctcattatacaaagagaaccttatgcaacctgacaaaccactgaggtcatggtgactcagtgatcagcagatggtacttcaacagcaatcccctgtcaaacctcagaacttgaggctgaaacattgcttccacccaccatcagtgaagatgtaactagcatgttacaagagtgaataatctggacttcagagattaagtcaccaatagtgatctcacaagcactcaccggaactcctataatgtctccactttgtccatgccatttagcaatctcatctcctaaatggactgtgcctatgattcttaaggagaaagtgaatcattggtagatatcctgcacaagcagctggactttccagtaatagctttcttggggctattaggaaaattaaacaagaaatgaggctttctgggtctgcctgtatgtcttctgcataagacaaagaagagacatcgaatcaaccaataagaagagcccaaataagcatcctcaaatcttttgggatttggcacttggggacatgagtagttgtctgggatacgtcatattctcaacagtttctttgtagtagtaggatcaccttcttataataggatcaccttcttgttgctatagctgtacccgaccttcccttctcccttgagtgcttgcatgagctccacttttccttttgcttgaacagcttctcctgagtcctccttaccgatggttgtgactttaattatatacatctctgtccctccagacagatccctctgtcctcactctctgatttcattgaggatcttgggtgagagagagggacctgcaggatgaacaaatgtctactctaagacagctagattgggaggttggctggtcactgatggttataatgactgtgggacaggattaacttcagaataaatgaacaggagacacagatatgaagaaagtttctgattgatatggtctgaagtactcctggtattgcaagtcatttgctctaattctcaattgtaggcaaactgatttgtaaatttgcttcttcagccttctttcctgtagcctagcatggagaatctgaccagaccccattttgagaaggtcagcctacactggaatgaactttttacattagggcatttgtatttccctcacaatacttgccacattacttggcataggagagatgcttagtgtaattataagttaacaagcctttggatcagggcttgactcatgatagacaaagtatatgcctgctggatggaagaatctcttgggcgagcaccatttttctttccatcacctttccttgaaaatatatcttcagctttgggtaggaggaatcttggtgtatgaaatcattgcaaatttacttcatcttttctggagtttgaagttgtgactctcctgctaccaattaaataaagcttactttgccat

SEQ ID NO: 1863 - protein, 1132 aa, Homo sapien
MKEICRICARELCGNQRRWIFHTASKLNLQVLLSHVLGKDVPRDGKAEFACSKCAFMLDRIYRFDTVIARIEALSIERLQKLLLEKDRLKFCIASMYRKNNDDSGAEIKAGNGTVDMSVLPDARYSALLQEDFAYSGFECWVENEDQIQEPHSCHGSEGPGNRPRRCRGCAALRVADSDYEAICKVPRKVARSISCGPSSRWSTSICTEEPALSEVGPPDLASTKVPPDGESMEEETPGSSVESLDASVQASPPQQKDEETERSAKELGKCDCCSDDQAPQHGCNHKLELALSMIKGLDYKPIQSPRGSRLPIPVKSSLPGAKPGPSMTDGVSSGFLNRSLKPLYKTPVSYPLELSDLQELWDDLCEDYLPLRVQPMTEELLKQQKLNSHETTITQQSVSDSHLAELQEKIQQTEATNKILQEKLNEMSYELKCAQESSQKQDGTIQNLKETLKSRERETEELYQVIEGQNDTMAKLREMLHQSQLGQLHSSEGTSPAQQQVALLDLQSALFCSQLEIQKLQRVVRQKERQLADAKQCVQFVEAAAHESEQQKEASWKHNQELRKALQQLQEELQNKSQQLRAWEAEKYNEIRTQEQNIQHLNHSLSHKEQLLQEFRELLQYRDNSDKTLEANEMLLEKLRQRIHDKAVALERAIDEKFSALEEKEKELRQLRLAVRERDHDLERLRDVLSSNEATMQSMESLLRAKGLEVEQLSTTCQNLQWLKEEMETKFSRWQKEQESIIQQLQTSLHDRNKEVEDLSATLLCKLGPGQSEIAEELCQRLQRKERMLQDLLSDRNKQVLEHEMEIQGLLQSVSTREQESQAAAEKLVQALMERNSELQALRQYLGGRDSLMSQAPISNQQAEVTPTGRLGKQTDQGSMQIPSRDDSTSLTAKEDVSIPRSTLGDLDTVAGLEKELSNAKEELELMAKKERESQMELSALQSMMAVQEEELQVQAADMESLTRNIQIKEDLIKDLQMQLVDPEDIPAMERLTQEVLLLREKVASVESQGQEISGNRRQQLLLMLEGLVDERSRLNEALQAERQLYSSLVKFHAHPESSERDRTLQVELEGAQVLRSRLEEVLGRSLERLNRLETLAAIGGAAAGDDTEDTSTEFTDSIEEEAAHHSHQQL

SEQ ID NO: 1864 - DNA, 673 bp, Homo sapien
gggcaactcaccctcactcagaggtcttctggttctggaaacaactctagctcagccttctccaccatgagcctcagacttgataccaccccttcctgtaacagtgcgagaccacttcatgccttgcaggtgctgctgcttctgtcattgctgctgactgctctggcttcctccaccaaaggacaaactaagagaaacttggcgaaaggcaaagaggaaagtctagacagtgacttgtatgctgaactccgctgcatgtgtataaagacaacctctggaattcatcccaaaaacatccaaagtttggaagtgatcgggaaaggaacccattgcaaccaagtcgaagtgatagccacactgaaggatgggaggaaaatctgcctggacccagatgctcccagaatcaagaaaattgtacagaaaaaattggcaggtgatgaatctgctgattaatttgttctgtttctgccaaacttctttaactcccaggaagggtagaattttgaaaccttgattttctagagttctcatttattcaggatacctattcttactgtattaaaatttggatatgtgtttcattctgtctcaaaaatcacattttattctgagaaggttggttaaaagatggcagaaagaagatgaaaataaataagcctggtttcaaccctct

SEQ ID NO: 1865 - protein, 128 aa, Homo sapien
MSLRLDTTPSCNSARPLHALQVLLLLSLLLTALASSTKGQTKRNLAKGKEESLDSDLYAELRCMCIKTTSGIHPKNIQSLEVIGKGTHCNQVEVIATLKDGRKICLDPDAPRIKKIVQKKLAGDESAD

SEQ ID NO: 1866 - DNA, 5316 bp, Homo sapien
  Unsure 3623-3650: Unknown base
caagccaattatggctccctttcccaatggtagtttgtgaatggctttaattcgccaggatcttataaaacaaatgctgctgctatgaatatgggtcgaccattccaaaaaaatcgtgtgaagcctcagtttaggtcatctggtggttcagaacactcaacagagggctctgtatccttgggggatggacagttgaacagatatagttcaagaaactttccagctgaacggcataaccccacagtaactgggcatcaggagcaaacttaccttcagaaggagacttccactttgcaggtggaacagaatggggactatggtaggggcaggagaactctcttcagaggtcgaagacgacgagaagatgacaggatctcaagacctcatccttcaacagctgaatcaaaggctccaacaccaaagtttgacttattagcctcaaattttccacctttacctggaagttcatcaagaatgccaggtgaactcgtttggagaataggatgtctgatgttgttaaaggtgtctacaaagaaaaggataatgaagagttgacaattagttgcccagtgcctgcagatgagcagacagaatgcacttctgcccagcaactcaatatgagtaccagttctccatgtgctgctgagcttactgcattaagcacaactcagcaagaaaaggatctaatagaagattcctctgttcagaaggatggtctcaatcagacaactataccagtttctcctccaagtactacaaagccatcgagggcaagtactgcttcaccatgtaataataacataaatgcagctacagctgtggctctacaggaaccccgaaagttaagttatgctgaagtgtgccagaagccccctaaagagccatcttcagttcttgtgcagccactacgggaacttcgctccaatgtggtgtctcccaccaaaaatgaagacaatggagctcctgagaactccgttgagaaaccacatgagaagccagaagcaagggctagtaaggattattctggcttccgaggcaatataatccccaggggagcagcaggaaaaatcagggaacagagacgccagtttagccatagggctatacctcagggagtgactcgacgtaatggcaaagagcaatatgtgccacccagatcaccaaagtaaaaaacaacaaaactattcaaaaacttcactctcttcccattaaacttgaactgtggctatattgaactgttttggaggggagggggtagccaggaaggaaacaagagaaagtacgtccatttcattatggattttggagttgtgagtgataggatcccaaaattcatctctaatgtggtttttaaatgctggaggattccaatcaatataaatatatatatatatatacacacacatatataaaaagtataatttttctatttttgtttttggttttaatttgcagagatttgctgccaggaatcaattttgagggttcagatttagcttggaagaaaaaaaagaaacatacatccttcagtataggagatgagggaatgagagaaaatattttttgaagaagcatttctgtaaaattagaaattactttttttaatctatttaaagtttggcttgaagaatgccatctctgactatatggccttgtattgcaaagcagatcagtggctggggtgcctgttgtgggtgtgagtgtgtacaagagcgattgaagccaaatctgttgtcatgttagtaaatgatttgaaaactgaatgtaatacttgagtagatttttttttctagtttgaaatttagtctgtctttttgaccttactaatatttcatttaacaagttgtaaaactctgattgtacttagagatgtgactaccaatcagtttgatactcaaggaaagggggttattcaagaaattgaaaatttcatcttggacctcagtgcatcggtcaaatggatttcagaggtttaaacttccctgtgattccccctgaatacccccaaaatgagaaacaaaattttttttcttactccatttgttactctctgttctttgactgcccacccacagaaaagcaaaataaccaactacctactcaattgtgtgtttgtaattgctttgagcagtctagtcaaatcatataaattgttctaaatttcagaattgaacattgaagtattaactcttctgttcacacatttagaattttagctcccaagatggtagggcagactgaccgtacagtaatttatttgtcgttagtgttaaagattaagcatagtaactgactcttaagtgttaaataatgtagaagtaaaaaaattttttttaaaggcttaatttgggaggggggacttatttctgtttacagtgtattaccttccttccctcctcttctccccccacacccaacaaaatacagtttggaattcactgaaacagtaccagcaagtcatgagattttttagtaaagatgagaaagatggttgaagaaaattagtgcataatttctcagtgaataaagttgtagctctcatatactaaatagacaagtttacatgctgttatttagaaaatgactaaaatattaaaaaccgtgttgtgttaatctgttttaagtcataccatgttcagagttctatgtaaggtgggttttatttttcttttaagggatagtttgtaatagtaagaactgtcccatatgttagtaaattacatatgtacaaattgaaactgtaaattgtgaacactggaaagcaccattgtgacatagagtaaacatcttagtaatatattaaagtgaatgtaaatggtggttaaaattacattactgtgaaattcatcttccaactctaagttaagctttggagatacatgttagtggttaactgttaagagctttgaaaacactgcacatatctgtacaagccagaattactatttctttgacttattattagcttggcagttgcttttgatttgattgttttatgacatggtatactactatatttactcagtttgaaactattcatttctacacactatttttaaaaattgcctactaggtgaaacataacaataaaactacctgtgctgaaatttgggggaagtttaggtcctttaaaaaaacatattaatcattgactacatctatgataaaagtgcttattttggtttactaagataatgcagttggtggaaatgataaacgttttaagtgttaacatcctttgaatgcgttggatttcagagaataaacattttgtaaaaatcacttggtaaggattataaacttaattactgcacttaaaatgaaacattactttttttaaacaatgtgtcacaaatgtaggtctgtattacttgtatgcttgtgtgacttactgttagtccagctctaaaaatttaaaggttgtaattgaaatacaagaaaagagccttcttttagaagaaagcaagtatatttttgcttttacttcaaatgttatttaaagtagaaatttaatttgtagatataacctttaaaaattttctcattaagacaatgtttttaatttaatttgcctcattacatctaatagttcccatttgatggcatgtatagggaagagtgannnnnnnnnnnnnnnnnnnnnnnnnnnnaatatttatatatattcacagtatgtatttagcatttattttattacagcagatttaaagtttgtatctaaataatgcctatgagttgtgtgaagctcttggcttttttccaacgttactttgtaactaatgagggtggatgttcattgtagtttatttatttggttctttagatggaggaatttaaaaaatcaaatttttctcttcacctttatgacttgacatttccttgatctgttggaggctaaaagtaggtataaatgatattgaatgttgggtatagtgatactctgccatagttcttactgcatgaagagaacaagagtcacacaagttcaccactttgcacttcatagagaaggtacatagagacattgcaaaacctgtctccatttgctatcctgataattaaggttttcataatacctagggcctgtctctgagtaattttaattttgccaaatacactgacatttaaaatagtgatccatctaaatttttttcagctgggttttgaggaatataagagctttcaatgataaaggtttgttgtagttgtcttatgtgctgaatttgcagatgatcagatgctgtgcagaattctgatttatttttgtttcctaaaattaagatagcttgaatattatttcacattcctttttcttttttaaataaacaggtttgctttggaaaggcttaatgatggaatgttagcatcttcactagggtaaagaagaacaaaaagaatgttgctggaacgtaaaatagtatttaaaagttaatgaacacttctctagttttcttagttatggccttaataattagtctcttggcttaaatgtccactggttttactttgacacagttgaacaacactggggttaagtctctggtatttaggctggcaatatatatattaaccatattttaaaagtaccaattttgtttttacagaaaagataaaactcaaaagagaacagtgtattccttctgaggggcttttataaattattaactataatatatgatggattttttcctaattttttatatttccttacaattttggtggccattaatttaactttaggcttttgggcatatgctagtctgagcttccgaaaagatacatatatgtttcccttttcattagctgaatgaggatattttaagaagttgaaagagaatttattttcaagttgtgagtaaatcctcctttgaaattcacctgattattagataacttaaagtttatttttaaaagctgacaactttttatgaatcttcgagttgacagttcctaaaagcgtaactcagatattaatgggctgtgtattaaatggttttattttcagttttgcagcacagaacactgttgaaatatccatatcaacttgatttttttaacctaattcaggtgtcctttgcatctcttaaatgttgggggtgggggtcagagccagttatccggcttctgttttgtcgattgcttagatttgttcctgttgtcaaaactgttacccccaaaattggtgtgacacatgctcatgcataaaatgttaaaatgagtacatccttgtatttgtatttgttttcaacatcgccaaggtgctatgggaaattaacaaaattagaaaaaaaataaaattattaaaaagcagaaaaa

SEQ ID NO: 1867 - protein, 360 aa, Homo sapien
MNMGRPFQKNRVKPQFRSSGGSEHSTEGSVSLGDGQLNRYSSRNFPAERHNPTVTGHQEQTYLQKETSTLQVEQNGDYGRGRRTLFRGRRRREDDRISRPHPSTAESKAPTPKFDLLASNFPPLPGSSSRMPGELVWRIGCLMLLKVSTKKRIMKSTISCPVPADEQTECTSAQQLNMSTSSPCAAELTALSTTQQEKDLIEDSSVQKDGLNQTTIPVSPPSTTKPSRASTASPCNNNINAATAVALQEPRKLSYAEVCQKPPKEPSSVLVQPLRELRSNVVSPTKNEDNGAPENSVEKPHEKPEARASKDYSGFRGNIIPRGAAGKIREQRRQFSHRAIPQGVTRRNGKEQYVPPRSPK

SEQ ID NO: 1868 - DNA, 801 bp, Homo sapien
caccgcaccctcggactgccccaaggcccccgccgccgctccagcgccgcgcagccaccgccgccgccgccgcctctccttagtcgccgccatgacgaccgcgtccacctcgcaggtgcgccagaactaccaccaggactcagaggccgccatcaaccgccagatcaacctggagctctacgcctcctacgtttacctgtccatgtcttactactttgaccgcgatgatgtggctttgaagaactttgccaaatactttcttcaccaatctcatgaggagagggaacatgctgagaaactgatgaagctgcagaaccaacgaggtggccgaatcttccttcaggatatcaagaaaccagactgtgatgactgggagagcgggctgaatgcaatggagtgtgcattacatttggaaaaaaatgtgaatcagtcactactggaactgcacaaactggccactgacaaaaatgacccccatttgtgtgacttcattgagacacattacctgaatgagcaggtgaaagccatcaaagaattgggtgaccacgtgaccaacttgcgcaagatgggagcgcccgaatctggcttggcggaatatctctttgacaagcacacctgggagacagtgataatgaaagctaagcctcgggctaatttcccatagccgtggggtgacttcctggtcaccaaggcagtgcatgcatgttggggtttcctttaccttttctataagttgtaccaaaacatccacttaagttctttgatttgtaccattccttcaaataaagaaatttggtaccc

SEQ ID NO: 1869 - protein, 190 aa, Homo sapien
MTTASTSQVRQNYHQDSEAAINRQINLELYASYVYLSMSYYFDRDDVALKNFAKYFLHQSHEEREHAEKLMKLQNQRGGRIFLQDIKKPDCDDWESGLNAMECALHLEKNVNQSLLELHKLATDKNDPHLCDFIETHYLNEQVKAIKELGDHVTNLRKMGAPESGLAEYLFDKHTWETVIMKAKPRANFP

SEQ ID NO: 1870 - DNA, 2732 bp, Homo sapien
gtctttatttcagtcccggatccgcgggcgcaggcccagctcaggcccccagggatggacgtcgtggaccctgacattttcaatagagacccccgggaccactatgacctgctacagcggctgggtggcggcacgtatggggaagtctttaaggctcgagacaaggtgtcaggggacctggtggcactgaagatggtgaagatggagcctgatgatgatgtctccacccttcagaaggaaatcctcatattgaaaacttgccggcacgccaacatcgtggcctaccatgggagttatctctggttgcagaaactctggatctgcatggaattctgtggggctggttctctccaggacatctaccaagtgacaggctccctgtcagagctccagattagctatgtctgccgggaagtgctccagggactggcctatttgcactcacagaagaagatacacagggacatcaagggagctaacatcctcatcaatgatgctggggaggtcagattggctgactttggcatctcggcccagattggggctacactggccagacgcctctctttcattgggacaccctactggatggctccggaagtggcagctgtggccctgaagggaggatacaatgagctgtgtgacatctggtccctgggcatcacggccatcgaactggccgagctacagccaccgctctttgatgtgcaccctctcagagttctcttcctcatgaccaagagtggctaccagcctccccgactgaaggaaaaaggcaaatggtcggctgccttccacaacttcatcaaagtcactctgactaagagtcccaagaaacgacccagcgccaccaagatgctcagtcatcaactggtatcccagcctgggctgaatcgaggcctgatcctggatcttcttgacaaactgaagaatcccgggaaaggaccctccattggggacattgaggatgaggagcccgagctaccccctgctatccctcggcggatcagatccacccaccgctccagctctctggggatcccagatgcagactgctgtcggcggcacatggagttcaggaagctccgaggaatggagaccagacccccagccaacaccgctcgcctacagcctcctcgagacctcaggagcagcagccccaggaagcaactgtcagagtcgtctgacgatgactatgacgacgtggacatccccacccctgcagaggacacacctcctccacttccccccaagcccaagttccgttctccatcagacgagggtcctgggagcatgggggatgatgggcagctgagcccgggggtgctggtccggtgtgccagtgggcccccaccaaacagcccccgtcctgggcctcccccatccaccagcagcccccacctcaccgcccattcagaaccctcactctggaacccaccctcccgggagcttgacaagcccccacttctgccccccaagaaggaaaagatgaagagaaagggatgtgcccttctcgtaaagttgttcaatggctgccccctccggatccacagcacggccgcctggacacatccctccaccaaggaccagcacctgctcctgggggcagaggaaggcatcttcatcctgaaccggaatgaccaggaggccacgctggaaatgctctttcctagccggactacgtgggtgtactccatcaacaacgttctcatgtctctctcaggaaagaccccccacctgtattctcatagcatccttggcctgctggaacggaaagagaccagagcaggaaaccccatcgctcacattagcccccaccgcctactggcaaggaagaacatggtttccaccaagatccaggacaccaaaggctgccgggcgtgctgtgtggcggagggtgcgagctctgggggcccgttcctgtgcggtgcattggagacgtccgttgtcctgcttcagtggtaccagcccatgaacaaattcctgcttgtccggcaggtgctgttcccactgccgacgcctctgtccgtgttcgcgctgctgaccgggccaggctctgagctgcccgctgtgtgcatcggcgtgagccccgggcggccggggaagtcggtgctcttccacacggtgcgctttggcgcgctctcttgctggctgggcgagatgagcaccgagcacaggggacccgtgcaggtgacccaggtagaggaagatatggtgatggtgttgatggatggctctgtgaagctggtgaccccggaggggtccccagtccggggacttcgcacacctgagatccccatgaccgaagcggtggaggccgtggctatggttggaggtcagcttcaggccttctggaagcatggagtgcaggtgtgggctctaggctcggatcagctgctacaggagctgagagaccctaccctcactttccgtctgcttggctcccccaggctggagtgcagtggcacgatctcgcctcactgcaacctcctcctcccaggttcaagcaattctcctgcctcagcctcccgagtagctgggattacaggcctgtagtggtggagacacgcccagtggatgatcctactgctcccagcaacctctacatccaggaatgagtccctaggggggtgtcaggaactagtccttgcaccccctcccccatagacacactagtggtcatggcatgtcctcatctcccaataaacatgactttagcctctgcaaaaaaa

SEQ ID NO: 1871 - protein, 833 aa, Homo sapien
MDVVDPDIFNRDPRDHYDLLQRLGGGTYGEVFKARDKVSGDLVALKMVKMEPDDDVSTLQKEILILKTCRHANIVAYHGSYLWLQKLWICMEFCGAGSLQDIYQVTGSLSELQISYVCREVLQGLAYLHSQKKIHRDIKGANILINDAGEVRLADFGISAQIGATLARRLSFIGTPYWMAPEVAAVALKGGYNELCDIWSLGITAIELAELQPPLFDVHPLRVLFLMTKSGYQPPRLKEKGKWSAAFHNFIKVTLTKSPKKRPSATKMLSHQLVSQPGLNRGLILDLLDKLKNPGKGPSIGDIEDEEPELPPAIPRRIRSTHRSSSLGIPDADCCRRHMEFRKLRGMETRPPANTARLQPPRDLRSSSPRKQLSESSDDDYDDVDIPTPAEDTPPPLPPKPKFRSPSDEGPGSMGDDGQLSPGVLVRCASGPPPNSPRPGPPPSTSSPHLTAHSEPSLWNPPSRELDKPPLLPPKKEKMKRKGCALLVKLFNGCPLRIHSTAAWTHPSTKDQHLLLGAEEGIFILNRNDQEATLEMLFPSRTTWVYSINNVLMSLSGKTPHLYSHSILGLLERKETRAGNPIAHISPHRLLARKNMVSTKIQDTKGCRACCVAEGASSGGPFLCGALETSVVLLQWYQPMNKFLLVRQVLFPLPTPLSVFALLTGPGSELPAVCIGVSPGRPGKSVLFHTVRFGALSCWLGEMSTEHRGPVQVTQVEEDMVMVLMDGSVKLVTPEGSPVRGLRTPEIPMTEAVEAVAMVGGQLQAFWKHGVQVWALGSDQLLQELRDPTLTFRLLGSPRLECSGTISPHCNLLLPGSSNSPASASRVAGITGL

SEQ ID NO: 1872 - DNA, 3605 bp, Homo sapien
gtcttgtgggtggaaacgcgctggctgactggggtcggcgtttagttcagcgcagcgactcggggacctggagctgacgcctagacacttgtattagctttaatagaagagaaatggaggagccatagaatattaaggatgaattcaggaaggcctgagaccatggaaaacttgcctgctctctacactattttccaaggagaggttgctatggtgacagactatggggcctttatcaaaatcccaggctgtcggaagcaaggtctggtccatcgaactcatatgtcatcctgtcgggtggataagccctctgagatagtagatgttggagataaagtgtgggtgaagcttattggccgagagatgaaaaatgatagaataaaagtatccctctccatgaaggttgtcaatcaagggactgggaaagaccttgatcccaacaatgttatcattgagcaagaagagaggcggaggcgatccttccaggattacactgggcagaagatcacccttgaggctgtcttgaacactacctgcaagaagtgtggctgtaaaggccactttgcaaaagattgtttcatgcaaccaggtgggactaaatactctctgatacctgatgaggaagaggaaaaggaagaggcaaagtcagcagagtttgagaagcctgaccctacaaggaatccttctagaaaaagaaagaaggagaagaagaaaaagaaacatagagataggaagtcatctgactctgacagctcagactctgagagtgatacaggcaagagggcaaggcacacatcaaaagacagcaaggcagcaaagaagaagaaaaagaagaagaagcacaagaagaagcacaaggagtgagagtataaagagtgtagggggtggttgagagtaagaaaccaggagccttgtgccttgagactcctggaaagactcaatagtgagaatatagcctcccaccccattaacttcgctcccatgggagatggcttcccctcatgcaacaggcaggtttgggagttagaggtcaaaagcagctgcctgaatgagttgttgtttccttatcactcctggtccctttgcaagtgaaccctgcagctcacccattcattcacccaacttccttcattcagcaggaggccctattaccctctccagctgccactgccagagctggattcctgtaaaggagtccaggctagagccacagagactgttgtggaggtgagttcggctgtagttagagtgattggacccttcctattggtctgtcctgggccaactggtgggtgatctctgctgcatccaacatgggagcagagactggcagcaggaggggggaacatggtgagaagtggtgctcacttttcccattcctcctaacatagttctactatgctagaagtggcatccagcggccacagctagaaaacagtctgcagtgtgacttaacttgtgtattgcattccagcagaccactgaaccagacagcgaagccaagatcattgttctactttgtatttactactgtgtgaatcagttgattctacttcaggtccttgcttaaattcctgtcactaaatggaaatgtgtttggttttaaacttactgagttatttttcctataatccttcttcctgggtaacttacagacttaaagtcactgagcctgcattagctgacaaaaacatttaatatgttaccttagaccttggagagatgcccagcagaggtacagagccaaaggcactagcagatcactgccttcttgggagatcacttataagccctcccttttgtaatgatcagatgccctcttccctcagagttgattagagaagcagtaagaatttgtagtcataagtactagcctggtgcacaggtcagcagtcctcttggccagtggtcattttctcccaccaccatggtacaagcctgggttctgtgccctgaacctgaattctggaaagggagagactacagcatttcacagagaacagccagacccaagagctttcagtgtaggatgggcctgaagtgacagttcaatagccaaacctggggaagccccatcactgactgaactaggtcatttgaccatggagggggggcagtgtaaaggcaacgtgtaggtacagctcttttattattaaatgtgtaaggtgatcagctgattaacaggctccgagactgtccatttcagtctcccatccagtgcttcttcctcagtaaccttcaggccgttatttctgcccactctctgacacacaggataaaccaagactcccagagttatgttaccaaaggcaaaaaggcaactgggtggccttggctctgctttattgacctcagagcaccctatgagtgcagttaaaaataaaaacaaaaaaaccacatacaccatgggaactggaactggatcccggtcagtggcacctgaccccagaagaattcgtggatttgtacaaaatgcagaggaagaaatgaggcaatgtggtgctgagtcgaggggtagccgattggcagagtagtagtcagcaacagtgcagtcaggtcatgcctctttctcataagtgcgagtgcaaactgcagtgccgtgggtgagtgtcaggatgagttttccatcaattagctcccgcacaagtgtggtctcttgcccgtcccatttctgcaggtgaacaagtttccctccatccagtgtcacaatggacttgaccttcctgtcatctgctgttgtctcatcgaactccacccccaacttaaagctgatctctgtgttcttgaaggtgctgtgtgtttttagggtgagaatgtccccattcttttcgatgattgtggtaggcttggtcatgctggccacctgcctggtagcaaaacccacaccgagtgacttcatgtagtcatcgaaattcttgctgtccactagcttccaggtgcccaggaaagcgtccaccatagtgatgctgggctaggctgagagaagctacaagagagcaggcgtgcaagggctccgacggcggctccctgcccgggctgccgctttaaatagccctcgcatcacatgaggagacgtggcccacgcccccggctcccgaaataggaagccccaggctagggctcacccaggaggggctggtgcgcccatcccccaacccaccgaggtggatggggaccagccagtggcgccctgctagcctgcgtcagcgccagtgcctggcccccgagtccctaccccaggctggtaggaccttctccctttcctggcctctaggcactctggaatctgagaaggaagcagccgacaccagcccgagagctagggcgcatgccatggtggatatcttcccgtcccccagtccctctttgagcttagcgtcagagcagagatgagactagaaaagcaaaacgcccttgggctggtgcccacgccggggaaagctctggttgacttctggcacgggcatctgtcctcgttttacaagtgagtccgaggctcacaggggaactgacaaggtctcaagaaataggagggggtgaatggagctcagattgcaagcttagtctagcgggcttcagagctcgcgctctcccttcactctcac

SEQ ID NO: 1873 - protein, 241 aa, Homo sapien
MNSGRPETMENLPALYTIFQGEVAMVTDYGAFIKIPGCRKQGLVHRTHMSSCRVDKPSEIVDVGDKVWVKLIGREMKNDRIKVSLSMKVVNQGTGKDLDPNNVIIEQEERRRRSFQDYTGQKITLEAVLNTTCKKCGCKGHFAKDCFMQPGGTKYSLIPDEEEEKEEAKSAEFEKPDPTRNPSRKRKKEKKKKKHRDRKSSDSDSSDSESDTGKRARHTSKDSKAAKKKKKKKKHKKKHKE

SEQ ID NO: 1874 - DNA, 2110 bp, Homo sapien
tgtactggaccagcttgtgcctttcaggctcttgcctgggcacctgggtgcttgcggcccacaagataagatatattgcgttgaactataatttatgttgattgctgaatgatttagggcgggggggtgggcaccccctgaaattctgccctggaggagtggcctcaccctaaccctggccgtggctaataataaggcccacctcttagggccgtggagtgaaataagttttccaggtaatgcgcagtagagccctcagccctccgctgaagttgcgttaggaaggaggaagggagaggtaaatgctgagcccgcaggcggcagtctgtgcctcggagagaaactttatcccaaccttgctgggggccttgacgcccaccttgccccaagagcaccccggcagccacccctgccctctggggtcctgccaccccgagcccgaccttcccccttttcccccgcgccgggccaatagcctcctaactgcgtcgtgctcatcacctttgcgtcgtttcttcgctccacaaacgtttactgagcgccttccacacgccaggcgccagactcgcgcggggaaacagggataagcactgaggaggggtcccagccctcagcgatgggatttcagagcgggagataaagggttgcccagaagggtggtgagtggaatggctgatataaacaacgggggcgcgatgaaatacacaggagggctgctagtcacatatggggcgggtgccgagggcccttgactaagggaggcttcctgcacgggtgacacccaagcggagtcctgacgacctgcgtcagaagtagccaggcgaggaggaggggaaaggaatccacgtcccgagcagagaggcagcgttccctacacagcacaggacacggtccgcgcacagaagccgcaggagacgcaggcacaggggctggggagaatccttgctgggccctcgccgcctccctctgccgggtgtctggtgccagcctcctgcctggcagaggagctccagcccctgctcccggaagcccctccaggccttcggcttccctgactgggcatgggcccctcgtcccctcgtcccctcgggtacggggccggtctccccgcccgcgggcggcgaagtaaaggcccagcgcagcccgcgctcctgccctggggcctcgtctttctccaggaaaacgtggaccgctctccgccgacaggtctcttccacagacccctgtcgccttcgcccccggtctcttccggttctgtcttttcgctggctcgatacgaacaaggaagtcgcccccagcggagccccggctcccccaggcagaggcggccccgggggcggagtcaacggcggaggccacgccctctgtgaaagggcggggcatgcaaattcgaaatgaaagcccgggaacgccggaagaagcacgggtgtaagatttcccttttcaaaggcggagaataagaaatcagcccgagagtgtaagggcgtcaatagcgctgtggacgagacagagggaatggggcaaggagcgaggctggggctctcaccgcgacttgaatgtggatgagagtgggacggtgacggcgggcgcgaaggcgagcgcatcgcttctcggccttttggctaagatcaagtgtagtatctgttcttatcagtttaatatctgatacgtcctctatccgaggacaatatattaaatggatttttggagcagggagatggaataggagcttgctccgtccactccacgcatcgacctggtgttgcagtacctccaggaacggtgcaccccctccggggatacaacgtgtttcctaaaagtagagggaggtaagagacggtagcacctgcggggcggcttgcacgccgagtgcctgtgacgcgccggcttgacttaactgcttccctgaagtaccgtgaggttcctgatgtgcgggcggtagacggtaggcttatgcggcacgctttcgtttccaccgtggctactgcgctttgggaaggccacgacctcctcctttggggaggtccttaggatctcagcttggcagtcgagtgggtggcgaccttttaaaggaatgggacccacccggagttcttctttctcctgtctc

SEQ ID NO: 1875 - protein, 11 aa, Homo sapien
MGPTRSSSFSC

SEQ ID NO: 1876 - DNA, 991 bp, Homo sapien
gggatcagtcttcccgcgtccgccgattcctcctccttggtcgccgcgtccttggctggcgtcagaaaaatggctacaaacttcctagcacatgagaagatctggttcgacaagttcaaatatgacgacgcagaaaggagattctacgagcagatgaacgggcctgtgcgaggtgcctcccgccaggagaacggcgccacggtgatcctccgtgacattgcgagagccagagagaacatccagaaatccctggctggaagctcaggccccggggcctccagcggcaccagcggagaccacggtgagctcgtcgtccggattgccagtctggaagtggagaaccagagtctgcgtggcgtggtacaggagctgcagcaggccatctccaagctggaggcccggctgaacgtgctggagaagagctcgcctggccaccgggccacggccccacagacccagcacgtatctcccatgcgccaagtggagcccccagccaagaagccagccacaccagcagaggatgacgaggatgatgacattgacctgtttggcagtgacaatgaggaggaggacaaggaggcggcacagctgcgggaggagcggctacggcagtacgcggagaagaaggccaagaagcctgcactggtggccaagtcctccatcctgctggatgtcaagccttgggatgatgagacggacatggcccagctggaggcctgtgtgcgctctatccagctggacgggctggtctggggggcttccaagctggtgcccgtgggctacggtatccggaagctacagattcagtgtgtggtggaggacgacaaggtggggacagacttgctggaggaggagatcaccaagtttgaggagcacgtgcagagtgtcgatatcgcagctttcaacaagatctgaagcctgagtgtgtgtacgtgcgcgcgtgcgtgagggccctgccacgattaaagactgagaccggcaaaaaaaaaaa

SEQ ID NO: 1877 - protein, 281 aa, Homo sapien [sequence omitted]

SEQ ID NO: 1878 - DNA, 2094 bp, Homo sapien
tccccgtacgcccaaatgaaacctacatgtgcagaatgaagcgttttttcgttgtcatcatgaaaactcctttttttctacctttctgtttctttttttaaatatgtatccttggggtttgtttattttttttttcttgtttcacttcaaatgaatctggaagaactttccagggggcttctccctgggtgtggtgtgtgatcggcagccccgccgttgtggcccgaggctcctggaagctcatcagctgatggtcttccttggcctgtagtaaaaatactgctgaattcctcgttgggctttaaatccattggcactgccacctggttccattgtaacatagcttttggattattagaaataggaataacttgatagttaaatcattcagcagcatctttacgaatatggtttgggaagctggccttggagctaagaatcacattgaatggttaatttatttttaattctatgaaaggagctggagagagagaagtaaaatattcaggggattttctgtgttttaaaagagaaaacctcctgattgcaagctctaaaataaatgctaagatttgtcacactttcagcccacgggagatttgcttttctcgcatagtatggactcaccaggatctgaaattaggggctttccttagaggtggcctcaggctttcctacccccacagttggattatgcagagaaggtcactgggtcctgaggctgctgccgaggcgtgctgtcccgggtggacagcgtggccctgtcatctttcattaggatgtgtgtgcctgtgccgcaccagccacaggtcaggatgccagcccctgcacgccctgcgtgctcatttgaaaactgagggtatctgggaagtcaccttacaaggtgccgaggagcagatggctaatttaaaggcaatctgtatgtgctctgagcctcccaaattatccatttcttgaatcctcaatgtgtgaaattcagcacactaagtcctcacaggctaggaaatcaaatgctggacaggccattccctaccatcatctggagtattcagagtatttggaatattcacagtcttcaaggtgtagctgtcgggctctgtgaaggataccttgcatttatagggatcgtcaggtctcctcttcctacgtatttgaagtattatggcttggagtactttctccaccaatgaagaaaagtttatatggcctctcctacgctcttgtcttgtcccaaaagtagggcttaactctgtccttgccatcaatctgtgcacatgttatggagtgaccatggtgaatgggcgatagaggttccttcctaggagaaactttcccagcttccccaaatgtgagaggggcgcctctctcccgaattccccagagccctttcctcccttccctctgccctcacctccctggatgcttcaggatactctgtggatactcttccgtgctccaggagagcatggccccgtggctgatagactcagctctcacccctctaagagctgctcatgagtatcctcgagtggatgagtgaacagatttctaactcaacagacataaatccccagtggagcttaagttaaatgcctggtttttaaattaagaaatatgacttcagcaatatgtataaaccaaaggaacattaaactaatgatagtatctttacaaatgagttgttgaggatttggagatagtttgtataacataaaacataacaaatacagtagaaagcatatggtagtgggattgaagaaacccgagaggttatttatcccaaacaccacctgatgttacagtgcttattgagtgattgatactgtgtcctacgtagagggggcacataaacaattcacatgtaatttttctgtattacattgacagatatatataaaatgatctctgcatctaaaattcaagcagtccagcctggaatactatcaccaaaaagtgaaaactgattttagaaacgaataatattttgttgtgaacaactctgaaaacatactggtcgatgaggtttatagctagagtctaaaatgccacatttatatgggtgaaacattttcagcttcaggagaaaataaaacc

SEQ ID NO: 1879 - protein, 161 aa, Homo sapien [sequence omitted]

SEQ ID NO: 1880 - DNA, 1350 bp, Homo sapien
aggttaatcttaaaagcccaggttacccgcggaaatttatgctgtccggtcaccgtgacaatgcagctgaggaacccagaactacatctgggctgcgcgcttgcgcttcgcttcctggccctcgtttcctgggacatccctggggctagagcactggacaatggattggcaaggacgcctaccatgggctggctgcactgggagcgcttcatgtgcaaccttgactgccaggaagagccagattcctgcatcagtgagaagctcttcatggagatggcagagctcatggtctcagaaggctggaaggatgcaggttatgagtacctctgcattgatgactgttggatggctccccaaagagattcagaaggcagacttcaggcagaccctcagcgctttcctcatgggattcgccagctagctaattatgttcacagcaaaggactgaagctagggatttatgcagatgttggaaataaaacctgcgcaggcttccctgggagttttggatactacgacattgatgcccagacctttgctgactggggagtagatctgctaaaatttgatggttgttactgtgacagtttggaaaatttggcagatggttataagcacatgtccttggccctgaataggactggcagaagcattgtgtactcctgtgagtggcctctttatatgtggccctttcaaaagcccaattatacagaaatccgacagtactgcaatcactggcgaaattttgctgacattgatgattcctggaaaagtataaagagtatcttggactggacatcttttaaccaggagagaattgttgatgttgctggaccagggggttggaatgacccagatatgttagtgattggcaactttggcctcagctggaatcagcaagtaactcagatggccctctgggctatcatggctgctcctttattcatgtctaatgacctccgacacatcagccctcaagccaaagctctccttcaggataaggacgtaattgccatcaatcaggaccccttgggcaagcaagggtaccagcttagacagggagacaactttgaagtgtgggaacgacctctctcaggcttagcctgggctgtagctatgataaaccggcaggagattggtggacctcgctcttataccatcgcagttgcttccctgggtaaaggagtggcctgtaatcctgcctgcttcatcacacagctcctccctgtgaaaaggaagctagggttctatgaatggacttcaaggttaagaagtcacataaatcccacaggcactgttttgcttcagctagaaaatacaatgcagatgtcattaaaagacttactttaa

SEQ ID NO: 1881 - protein, 429 aa, Homo sapien
MQLRNPELHLGCALALRFLALVSWDIPGARALDNGLARTPTMGWLHWERFMCNLDCQEEPDSCISEKLFMEMAELMVSEGWKDAGYEYLCIDDCWMAPQRDSEGRLQADPQRFPHGIRQLANYVHSKGLKLGIYADVGNKTCAGFPGSFGYYDIDAQTFADWGVDLLKFDGCYCDSLENLADGYKHMSLALNRTGRSIVYSCEWPLYMWPFQKPNYTEIRQYCNHWRNFADIDDSWKSIKSILDWTSFNQERIVDVAGPGGWNDPDMLVIGNFGLSWNQQVTQMALWAIMAAPLFMSNDLRHISPQAKALLQDKDVIAINQDPLGKQGYQLRQGDNFEVWERPLSGLAWAVAMINRQEIGGPRSYTIAVASLGKGVACNPACFITQLLPVKRKLGFYEWTSRLRSHINPTGTVLLQLENTMQMSLKDLL

SEQ ID NO: 1882 - DNA, 630 bp, Homo sapien
atggtcgactacctagcaaataagcccaagggtcagaattctttggctttacacaaagtcatcatggtgggcagtggtggcgtgggcaagtcagctctgactctacagttcatgtacgatgagtttgtggaggactatgagcctaccaaagcagacagctatcggaagaaggtagtgctagatggggaggaagtccagatcgatatcttagatacagctgggcaggaggactacgctgcaattagagacaactacttccgaagtggggaggggttcctctgtgttttctctattacagaaatggaatcctttgcagctacagctgacttcagggagcagattttaagagtaaaagaagatgagaatgttccatttctactggttggtaacaaatcagatttagaagataaaagacaggtttctgtagaagaggcaaaaaacagagctgagcagtggaatgttaactacgtggaaacatctgctaaaacacgagctaatgttgacaaggtattttttgatttaatgagagaaattcgagcgagaaagatggaagacagcaaagaaaagaatggaaaaaagaagaggaaaagtttagccaagagaatcagagaaagatgctgcattttataa

SEQ ID NO: 1883 - protein, 209 aa, Homo sapien
MVDYLANKPKGQNSLALHKVIMVGSGGVGKSALTLQFMYDEFVEDYEPTKADSYRKKVVLDGEEVQIDILDTAGQEDYAAIRDNYFRSGEGFLCVFSITEMESFAATADFREQILRVKEDENVPFLLVGNKSDLEDKRQVSVEEAKNRAEQWNVNYVETSAKTRANVDKVFFDLMREIRARKMEDSKEKNGKKKRKSLAKRIRERCCIL

SEQ ID NO: 1884 - DNA, 1155 bp, Homo sapien
atggattgcagtaacggatcggcagagtgtaccggagaaggaggatcaaaagaggtggtggggacttttaaggctaaagacctaatagtcacaccagctaccattttaaaggaaaaaccagaccccaataatctggtttttggaactgtgttcacggatcatatgctgacggtggagtggtcctcagagtttggatgggagaaacctcatatcaagcctcttcagaacctgtcattgcaccctggctcatcagctttgcactatgcagtggaattatttgaaggattgaaggcatttcgaggagtagataataaaattcgactgtttcagccaaacctcaacatggatagaatgtatcgctctgctgtgagggcaactctgccggtatttgacaaagaagagctcttagagtgtattcaacagcttgtgaaattggatcaagaatgggtcccatattcaacatctgctagtctgtatattcgtcctgcattcattggaactgagccttctcttggagtcaagaagcctaccaaagccctgctctttgtactcttgagcccagtgggaccttatttttcaagtggaacctttaatccagtgtccctgtgggccaatcccaagtatgtaagagcctggaaaggtggaactggggactgcaagatgggagggaattacggctcatctctttttgcccaatgtgaagacgtagataatgggtgtcagcaggtcctgtggctctatggcagagaccatcagatcactgaagtgggaactatgaatctttttctttactggataaatgaagatggagaagaagaactggcaactcctccactagatggcatcattcttccaggagtgacaaggcggtgcattctggacctggcacatcagtggggtgaatttaaggtgtcagagagatacctcaccatggatgacttgacaacagccctggaggggaacagagtgagagagatgtttagctctggtacagcctgtgttgtttgcccagtttctgatatactgtacaaaggcgagacaatacacattccaactatggagaatggtcctaagctggcaagccgcatcttgagcaaattaactgatatccagtatggaagagaagagagcgactggacaattgtgctatcctga

SEQ ID NO: 1885 - protein, 384 aa, Homo sapien
MDCSNGSAECTGEGGSKEVVGTFKAKDLIVTPATILKEKPDPNNLVFGTVFTDHMLTVEWSSEFGWEKPHIKPLQNLSLHPGSSALHYAVELFEGLKAFRGVDNKIRLFQPNLNMDRMYRSAVRATLPVFDKEELLECIQQLVKLDQEWVPYSTSASLYIRPAFIGTEPSLGVKKPTKALLFVLLSPVGPYFSSGTFNPVSLWANPKYVRAWKGGTGDCKMGGNYGSSLFAQCEDVDNGCQQVLWLYGRDHQITEVGTMNLFLYWINEDGEEELATPPLDGIILPGVTRRCILDLAHQWGEFKVSERYLTMDDLTTALEGNRVREMFSSGTACVVCPVSDILYKGETIHIPTMENGPKLASRILSKLTDIQYGREESDWTIVLS

SEQ ID NO: 1886 - DNA, 1714 bp, Homo sapien
ggggcattttgtgcctgcctagctatccagacagagcagctaccctcagctctagctgatactacagacagtacaacagatcaagaagtatggcagtgacaactcgtttgacacggttgcacgaaaagatcctgcaaaatcattttggagggaagcggcttagccttctctataagggtagtgtccatggattccgtaatggagttttgcttgacagatgttgtaatcaagggcctactctaacagtgatttatagtgaagatcatattattggagcatatgcggaagagagttaccaggaaggaaagtatgcttccatcatcctttttgcacttcaagatactaaaatttcagaatggaaactaggactatgtacaccagaaacactgttttgttgtgatgttacaaaatataactccccaactaatttccagatagatggaagaaatagaaaagtgattatggacttaaagacaatggaaaatcttggacttgctcaaaattgtactatctctattcaggattatgaagtttttcgatgcgaagattcactggatgaaagaaagataaaaggggtcattgagctcaggaagagcttactgtctgccttgagaacttatgaaccatatggatccctggttcaacaaatacgaattctgctgctgggtccaattggagctgggaagtccagctttttcaactcagtgaggtctgttttccaagggcatgtaacgcatcaggctttggtgggcactaatacaactgggatatctgagaagtataggacatactctattagagacgggaaagatggcaaatacctgccgtttattctgtgtgactcactggggctgagtgagaaagaaggcggcctgtgcagggatgacatattctatatcttgaacggtaacattcgtgatagataccagtttaatcccatggaatcaatcaaattaaatcatcatgactacattgattccccatcgctgaaggacagaattcattgtgtggcatttgtatttgatgccagctctattcaatacttctcctctcagatgatagtaaagatcaaaagaattcgaagggagttggtaaacgctggtgtggtacatgtggctttgctcactcatgtggatagcatggatttgattacaaaaggtgaccttatagaaatagagagatgtgagcctgtgaggtccaagctagaggaagtccaaagaaaacttggatttgctctttctgacatctcggtggttagcaattattcctctgagtgggagctggaccctgtaaaggatgttctaattctttctgctctgagacgaatgctatgggctgcagatgacttcttagaggatttgccttttgagcaaatagggaatctaagggaggaaattatcaactgtgcacaaggaaaaaaatagatatgtgaaaggttcacgtaaatttcctcacatcacagaagattaaaattcagaaaggagaaaacacagaccaaagagaagtatctaagaccaaagggatgtgttttattaatgtctaggatgaagaaatgcatagaacattgtagtacttgtaaataactagaaataacatgatttagtcataattgtgaaaaatagtaataatttttcttggatttatgttctgtatctgtgaaaaaataaatttcttataaaactcggaaaaaaaaaaaaaaaaaaaaaaaaaaaaa

SEQ ID NO: 1887 - protein, 444 aa, Homo sapien
MAVTTRLTRLHEKILQNHFGGKRLSLLYKGSVHGFRNGVLLDRCCNQGPTLTVIYSEDHIIGAYAEESYQEGKYASIILFALQDTKISEWKLGLCTPETLFCCDVTKYNSPTNFQIDGRNRKVIMDLKTMENLGLAQNCTISIQDYEVFRCEDSLDERKIKGVIELRKSLLSALRTYEPYGSLVQQIRILLLGPIGAGKSSFFNSVRSVFQGHVTHQALVGTNTTGISEKYRTYSIRDGKDGKYLPFILCDSLGLSEKEGGLCRDDIFYILNGNIRDRYQFNPMESIKLNHHDYIDSPSLKDRIHCVAFVFDASSIQYFSSQMIVKIKRIRRELVNAGVVHVALLTHVDSMDLITKGDLIEIERCEPVRSKLEEVQRKLGFALSDISVVSNYSSEWELDPVKDVLILSALRRMLWAADDFLEDLPFEQIGNLREEIINCAQGKK

SEQ ID NO: 1888 - DNA, 555 bp, Homo sapien
acgatgcgcgagtacaaagtggtggtgctgggctcgggcggggtaggcaaatccgccctgaccgtgcagttcgtgaccggcaccttcatcgagaaatacgaccccaccatcgaggacttctaccgcaaggagatcgaggtggattcgtcgccgtcggtgctggagatcctggacacggcgggcaccgagcagttcgcgtccatgcgggacctgtacatcaagaacggccagggcttcatcctcgtctacagcctcgtcaaccagcagagcttccaggacatcaagcccatgcgggaccagatcatccgcgtgaagcggtatgagaaagtgccagtcatcttggttgggaacaaagtggacctggaaagtgagagagaagtatcgtccagcgaaggcagagcccttgctgaagagtggggctgcccctttatggaaacttccgctaagagtaaaacaatggtggacgaactctttgcagaaattgtgaggcagatgaactatgctgctcagcctgacaaagatgacccatgctgttctgcatgtaacatacaatag

SEQ ID NO: 1889 - protein, 183 aa, Homo sapien
MREYKVVVLGSGGVGKSALTVQFVTGTFIEKYDPTIEDFYRKEIEVDSSPSVLEILDTAGTEQFASMRDLYIKNGQGFILVYSLVNQQSFQDIKPMRDQIIRVKRYEKVPVILVGNKVDLESEREVSSSEGRALAEEWGCPFMETSAKSKTMVDELFAEIVRQMNYAAQPDKDDPCCSACNIQ

SEQ ID NO: 1890 - DNA, 1062 bp, Homo sapien
atggaaaccaacttctccattcctctgaatgaaactgaggaggtgctccctgagcctgctggccacaccgttctgtggatcttctcattgctagtccacggagtcacctttgtcttcggggtcctgggcaatgggcttgtgatctgggtggctggattccggatgacacgcacagtcaacaccatctgttacctgaacctggccctagctgacttctctttcagtgccatcctaccattccgaatggtctcagtcgccatgagagaaaaatggccttttgcgtcattcctatgtaagttagttcatgttatgatagacatcaacctgtttgtcagtgtctacctgatcaccatcattgctctggaccgctgtatttgtgtcctgcatccagcctgggcccagaaccatcgcaccatgagtctggccaagagggtgatgacgggactctggattttcaccatagtccttaccttaccaaatttcatcttctggactacaataagtactacgaatggggacacatactgtattttcaactttgcattctggggtgacactgctgtagagaggttgaacgtgttcattaccatggccaaggtctttctgatcctccacttcattattggcttcacggtgcctatgtccatcatcacagtctgctatgggatcatcgctgccaaaattcacagaaaccacatgattaaatccagccgtcccttacgtgtcttcgctgctgtggtggcttctttcttcatctgttggttcccttatgaactaattggcattctaatggcagtctggctcaaagagatgttgttaaatggcaaatacaaaatcattcttgtcctgattaacccaacaagctccttggccttttttaacagctgcctcaacccaattctctacgtctttatgggtcgtaacttccaagaaagactgattcgctctttgcccactagtttggagagggccctgactgaggtccctgactcagcccagaccagcaacacacacaccacttctgcttcacctcctgaggagacggagttacaagcaatgtga

SEQ ID NO: 1891 - protein, 353 aa, Homo sapien
METNFSIPLNETEEVLPEPAGHTVLWIFSLLVHGVTFVFGVLGNGLVIWVAGFRMTRTVNTICYLNLALADFSFSAILPFRMVSVAMREKWPFASFLCKLVHVMIDINLFVSVYLITIIALDRCICVLHPAWAQNHRTMSLAKRVMTGLWIFTIVLTLPNFIFWTTISTTNGDTYCIFNFAFWGDTAVERLNVFITMAKVFLILHFIIGFTVPMSIITVCYGIIAAKIHRNHMIKSSRPLRVFAAVVASFFICWFPYELIGILMAVWLKEMLLNGKYKIILVLINPTSSLAFFNSCLNPILYVFMGRNFQERLIRSLPTSLERALTEVPDSAQTSNTHTTSASPPEETELQAM

SEQ ID NO: 1892 - DNA, 3250 bp, Homo sapien
cggacgcgtgggccggttcagccatggggacctctccgagcagcagcaccgccctcgcctcctgcagccgcatcgcccgccgagccacagccacgatgatcgcgggctcccttctcctgcttggattccttagcaccaccacagctcagccagaacagaaggcctcgaatctcattggcacataccgccatgttgaccgtgccaccggccaggtgctaacctgtgacaagtgtccagcaggaacctatgtctctgagcattgtaccaacacaagcctgcgcgtctgcagcagttgccctgtggggacctttaccaggcatgagaatggcatagagaaatgccatgactgtagtcagccatgcccatggccaatgattgagaaattaccttgtgctgccttgactgaccgagaatgcacttgcccacctggcatgttccagtctaacgctacctgtgccccccatacggtgtgtcctgtgggttggggtgtgcggaagaaagggacagagactgaggatgtgcggtgtaagcagtgtgctcggggtaccttctcagatgtgccttctagtgtgatgaaatgcaaagcatacacagactgtctgagtcagaacctggtggtgatcaagccggggaccaaggagacagacaacgtctgtggcacactcccgtccttctccagctccacctcaccttcccctggcacagccatctttccacgccctgagcacatggaaacccatgaagtcccttcctccacttatgttcccaaaggcatgaactcaacagaatccaactcttctgcctctgttagaccaaaggtactgagtagcatccaggaagggacagtccctgacaacacaagctcagcaagggggaaggaagacgtgaacaagaccctcccaaaccttcaggtagtcaaccaccagcaaggcccccaccacagacacatcctgaagctgctgccgtccatggaggccactgggggcgagaagtccagcacgcccatcaagggccccaagaggggacatcctagacagaacctacacaagcattttgacatcaatgagcatttgccctggatgattgtgcttttcctgctgctggtgcttgtggtgattgtggtgtgcagtatccggaaaagctcgaggactctgaaaaaggggccccggcaggatcccagtgccattgtggaaaaggcagggctgaagaaatccatgactccaacccagaaccgggagaaatggatctactactgcaatggccatggtatcgatatcctgaagcttgtagcagcccaagtgggaagccagtggaaagatatctatcagtttctttgcaatgccagtgagagggaggttgctgctttctccaatgggtacacagccgaccacgagcgggcctacgcagctctgcagcactggaccatccggggccccgaggccagcctcgcccagctaattagcgccctgcgccagcaccggagaaacgatgttgtggagaagattcgtgggctgatggaagacaccacccagctggaaactgacaaactagctctcccgatgagccccagcccgcttagcccgagccccatccccagccccaacgcgaaacttgagaattccgctctcctgacggtggagccttccccacaggacaagaacaagggcttcttcgtggatgagtcggagccccttctccgctgtgactctacatccagcggctcctccgcgctgagcaggaacggttcctttattaccaaagaaaagaaggacacagtgttgcggcaggtacgcctggacccctgtgacttgcagcctatctttgatgacatgctccactttctaaatcctgaggagctgcgggtgattgaagagattccccaggctgaggacaaactagaccggctattcgaaattattggagtcaagagccaggaagccagccagaccctcctggactctgtttatagccatcttcctgacctgctgtagaacatagggatactgcattctggaaattactcaatttagtggcagggtggttttttaattttcttctgtttctgatttttgttgtttggggtgtgtgtgtgtgtttgtgtgtgtgtgtgtgtgtgtgtgtgtgtgtgtttaacagagaatatggccagtgcttgagttctttctccttctctctctctcttttttttttaaataactcttctgggaagttggtttataagcctttgccaggtgtaactgttgtgaaatacccaccactaaagttttttaagttccatattttctccattttgccttcttatgtattttcaagattattctgtgcactttaaatttacttaacttaccataaatgcagtgtgacttttcccacacactggattgtgaggctcttaacttcttaaaagtataatggcatcttgtgaatcctataagcagtctttatgtctcttaacattcacacctactttttaaaaacaaatattattactatttttattattgtttgtcctttataaattttcttaaagattaagaaaatttaagaccccattgagttactgtaatgcaattcaactttgagttatcttttaaatatgtcttgtatagttcatattcatggctgaaacttgaccacactattgctgattgtatggttttcacctggacaccgtgtagaatgcttgattacttgtactcttcttatgctaatatgctctgggctggagaaatgaaatcctcaagccatcaggatttgctatttaagtggcttgacaactgggccaccaaagaacttgaacttcaccttttaggatttgagctgttctggaacacattgctgcactttggaaagtcaaaatcaagtgccagtggcgccctttccatagagaatttgcccagctttgctttaaaagatgtcttgttttttatatacacataatcaataggtccaatctgctctcaaggccttggtcctggtgggattccttcaccaattactttaattaaaaatggctgcaactgtaagaacccttgtctgatatatttgcaactatgctcccatttacaaatgtaccttctaatgctcagttgccaggttccaatgcaaaggtggcgtggactccctttgtgtgggtggggtttgtgggtagtggtgaaggaccgatatcagaaaaatgccttcaagtgtactaatttattaataaacattaggtgtttgttaaaaaaaaaaaaaaaaaaaaaaaaaaaaa

SEQ ID NO: 1893 - protein, 655 aa, Homo sapien
MGTSPSSSTALASCSRIARRATATMIAGSLLLLGFLSTTTAQPEQKASNLIGTYRHVDRATGQVLTCDKCPAGTYVSEHCTNTSLRVCSSCPVGTFTRHENGIEKCHDCSQPCPWPMIEKLPCAALTDRECTCPPGMFQSNATCAPHTVCPVGWGVRKKGTETEDVRCKQCARGTFSDVPSSVMKCKAYTDCLSQNLVVIKPGTKETDNVCGTLPSFSSSTSPSPGTAIFPRPEHMETHEVPSSTYVPKGMNSTESNSSASVRPKVLSSIQEGTVPDNTSSARGKEDVNKTLPNLQVVNHQQGPHHRHILKLLPSMEATGGEKSSTPIKGPKRGHPRQNLHKHFDINEHLPWMIVLFLLLVLVVIVVCSIRKSSRTLKKGPRQDPSAIVEKAGLKKSMTPTQNREKWIYYCNGHGIDILKLVAAQVGSQWKDIYQFLCNASEREVAAFSNGYTADHERAYAALQHWTIRGPEASLAQLISALRQHRRNDVVEKIRGLMEDTTQLETDKLALPMSPSPLSPSPIPSPNAKLENSALLTVEPSPQDKNKGFFVDESEPLLRCDSTSSGSSALSRNGSFITKEKKDTVLRQVRLDPCDLQPIFDDMLHFLNPEELRVIEEIPQAEDKLDRLFEIIGVKSQEASQTLLDSVYSHLPDLL

SEQ ID NO: 1894 - DNA, 5741 bp, Homo sapien
atgaggagggacgagcgagacgccaaagccatgcggtccctgcagccgccggatggggccggctcgccccccgagagtctgaggaacggctacgtgaagagctgcgtgagccccttgcggcaggaccctccgcgcggcttcttcttccacctctgccgcttctgcaacgtggagctgcggccgccgccggcctctccccagcagccgcggcgctgctcccccttctgccgggcgcgcctctcgctgggcgacctggctgcctttgtcctcgccctgctgctgggagcggaacccgagagctgggctgccggggccgcctggctgcggacgctgctgagcgtgtgttcgcacagcttgagccccctcttcagcatcgcctgtgccttcttcttcctcacctgcttcctcacccggaccaagcggggacccggcccgggccggagctgcggctcctggtggctgctggcgctgcccgcctgctgttacctgggggacttcttggtgtggcagtggtggtcttggccttggggggatggcgacgcagggtccgcggccccgcacacgcccccggaggcggcagcgggcaggttgctgctggtgctgagctgcgtagggctgctgctgacgctcgcgcacccgctgcggctccggcactgcgttctggtgctgctcctggccagcttcgtctggtgggtctccttcaccagcctcgggtcgctgccctccgccctcaggccgctgctctccggcctggtggggggcgctggctgcctgctggccctggggttggatcacttctttcaaatcagggaagcgcctcttcatcctcgactgtccagtgccgccgaagaaaaagtgcctgtgatccgaccccggaggaggtccagctgcgtgtcgttaggagaaactgcagccagttactatggcagttgcaaaatattcaggagaccgtcgttgccttgtatttccagagaacagatgattctttgggattgggacttaaaacaatggtataagcctcattatcaaaattctggaggtggaaatggagttgatctttcagtgctaaatgaggctcgcaatatggtgtcagatcttctgactgatccaagccttccaccacaagtcatttcctctctacggagtattagtagcttaatgggtgctttctcaggttcctgtaggccaaagattaatcctctcacaccatttcctggattttacccctgttctgaaatagaggacccagctgagaaaggggatagaaaacttaacaagggactaaataggaatagtttgccaactccacagctgaggagaagctcaggaacttcaggattgctacctgttgaacagtcttcaaggtgggatcgtaataatggcaaaagacctcaccaagaatttggcatttcaagtcaaggatgctatctaaatgggccttttaattcaaatctactgactatcccgaagcaaaggtcatcttctgtatcactgactcaccatgtaggtctcagaagagctggtgttttgtccagtctgagtcctgtgaattcttccaaccatggaccagtgtctactggccctctaactaatcgatcacccatagaatttcctgatactgctgattttcttaataagccaagcgttatcttgcagagatctctgggcaatgcacctaatactccagatttttatcagcaacttagaaattctgatagcaatctgtgtaacagctgtggacatcaaatgctgaaatatgtttcaacatctgaatcagatggtacagattgctgcagtggaaaatcaggtgaagaagaaaacattttctcgaaagaatcattcaaacttatggaaactcaacaagaagaggaaacagagaagaaagacagcagaaaattatttcaggaaggtgataagtggctaacagaagaggcacagagtgaacagcaaacaaatattgaacaggaagtatcactggacctgattttagtagaagagtatgactcattaatagaaaagatgagcaactggaattttccaatttttgaacttgtagaaaagatgggagagaaatcaggaaggattctcagtcaggttatgtataccttatttcaagacactggtttattggaaatatttaaaattcccactcaacaatttatgaactattttcgtgcattagaaaatggctatcgagacattccttatcacaatcgtatacatgccacagatgtgctacatgcagtttggtatctgacaacacggccagttcctggcttacagcagatccacaatggttgtggaacaggaaatgaaacagattctgatggtagaattaaccatgggcgaattgcttatatttcttcgaagagctgctctaatcctgatgagagttatggctgcctgtcttcaaacattcctgcattagaattgatggctctatacgtggcagctgccatgcatgattatgatcacccagggaggacaaatgcatttctagtggctacaaatgcccctcaggcagttttatacaatgacagatctgttctggaaaatcatcatgctgcgtcagcttggaatctatatctttctcgcccagaatacaacttccttcttcatcttgatcatgtggaattcaagcgctttcgttttttagtcattgaagcaatccttgctacggatcttaaaaagcattttgattttctcgcagaattcaatgccaaggccaaatgatgtaaatagtaatggcatagaatggagtaatgaaaatgatcgcctcttggtatgccaggtgtgcatcaaactggcagatataaatggcccagcaaaagttcgagacttgcatttgaaatggacagaaggcattgtcaatgaattttatgagcagggagatgaagaagcaaatcttggtctgcccatcagtccattcatggatcgttcttctcctcaactagcaaaactccaagaatcttttatcacccacatagtgggtcccctgtgtaactcctatgatgctgctggtttgctaccaggtcagtggttagaagcagaagaggataatgatactgaaagtggtgatgatgaagacggtgaagaattagatacagaagatgaagaaatggaaaacaatctaaatccaaaaccaccaagaaggaaaagcagacggcgaatattttgtcagctaatgcaccacctcactgaaaaccacaagatatggaaggaaatcgtagaggaagaagaaaaatgtaaagctgatgggaataaactgcaggtggagaattcctccttacctcaagcagatgagattcaggtaattgaagaggcagatgaagaggaatagcgacagtttgagtaaaagaaaagtcatattgaagaagcccagagggttgtgcccaggggcagaaatcattgcctagtgttcaccggctgactctcaactgaccattcccatgtggacaggccttaatactgtgagaggatccttgctctgctggcagtttcccactcctatgcactttcacaggaactagaaaactattcttaaaccaaaaataccatccgtgttgacccatgttgcagagcccttacttaaatccttcactggtgtatgaatactttgtcataatgctgctttgctgggtagtgagctcttatttttcactgggggtcagctataactaaaaactcaagtgacatatttcagttaccaaagtggccaggaactttttgcttttatgaaaatagattcatattgtatttcccagtgtgtcttttatgtctttgaatgttttggagaaaagtctatgcctgtctaaaaatgaatccagtgttgcctttctgagggatttctgctcaatgcaatacactgttcagtgctattctcccagctaggtttatccatgaaggactgagtgacctttgttgtatttaacaaaatccaggtgcatcaatttctgatgctttttactattgtgtattatctactatgtgtgttttatttctgctgagagtattcaggtttgccatggacatcagaagtttgaattccagtcttatcttatgttccatggctgaattttaaagctgtttaggtttaacaatgaagggatttattctttagtcaaaattgttgtttttactctagctcaggattcgtatttttaaagatttagttaatataaacacagcacagatttgtcagaagaaaaaaaatttgctgtaataccaaaactaacctcatcaaagatacagaaaaaaagaaatatagtgagccctaaaggacacatacattgaataaataattggaacatgtggttatctttagatccacatcttagctgtcatttgttcactctaaaactgatgttcatctttctgttaatttccctctgcctaaagactacatgacagaaatgacctatcactacttattatttctgaagcctaactgcaagactgatttctgagaacaagtaaagaactggaatacttatttttcatataaaaatctaaatgtgttaataaatcatttcatacaaaagtacattattaaataaccacattattaaaataattgcaagaaaatggaccatatttacaatgttttgtaaacttgctagtgtgtggatatgtaccctacttgtgaaatacatttgaagatataaagagcagccaaaatgatggcaaaatggtaggctaatattttctattattattggagaacatatcatattttggaatcatgcaattttgcacacagtgaaaccattaattttccaaggtaattcctttagaatatggtattggcatgcagtttcttacttatctagaatatttggcttatctgaaagatatcaatttaagatctctggaagtgttagaatttttgatccttcacagtgtcaatatttaatgaatcactaagctttatttattagacgtgttgagtgagtgctgagttccttgctgccacttttgttaccattgtcacacactatgtgtaaaccagtcccaccacttattactaataaaattttgactgataatttatatttgcacttacaatatatatatcctgtccttatatttctctagagtacattttccatcatgtttaagtgtatttctgctattatttcctctcctgcagaatacatacaagtgtatgtgtataaagtcatacatgtacaagcatgcatattgagattgaatcacatttccatactgtctgttattttattgggttttatattgggtttctttagtttatgttgttttctcaaaagcagcattttaaattacgaatactggacttattggatttaattataaatccaattactactggaaactcatttttacataatatagtccttaaattatttaacccttgctaagtaattgacatatgtaacaataactagcctaaagaaacccaaaaaaagtatctctcccgagctgaaacttaaaaattcgtaagtgtaagaaagaatgtgagaatatattaaatgcacactgtaccattagatgaaatcttacttgagaaattgccataagccatattacagatcttactttgattgttactgaatcagattaatttcttgttataataattttcatcataaattttctatttttaaagccgctggtactagaaatattcttttaatgctatatctatgtacctactgacacatttttctccataaaagtacttttaaaaattacttcatgatttg

SEQ ID NO: 1895 - protein, 910 aa, Homo sapien
MRRDERDAKAMRSLQPPDGAGSPPESLRNGYVKSCVSPLRQDPPRGFFFHLCRFCNVELRPPPASPQQPRRCSPFCRARLSLGDLAAFVLALLLGAEPESWAAGAAWLRTLLSVCSHSLSPLFSIACAFFFLTCFLTRTKRGPGPGRSCGSWWLLALPACCYLGDFLVWQWWSWPWGDGDAGSAAPHTPPEAAAGRLLLVLSCVGLLLTLAHPLRLRHCVLVLLLASFVWWVSFTSLGSLPSALRPLLSGLVGGAGCLLALGLDHFFQIREAPLHPRLSSAAEEKVPVIRPRRRSSCVSLGETAASYYGSCKIFRRPSLPCISREQMILWDWDLKQWYKPHYQNSGGGNGVDLSVLNEARNMVSDLLTDPSLPPQVISSLRSISSLMGAFSGSCRPKINPLTPFPGFYPCSEIEDPAEKGDRKLNKGLNRNSLPTPQLRRSSGTSGLLPVEQSSRWDRNNGKRPHQEFGISSQGCYLNGPFNSNLLTIPKQRSSSVSLTHHVGLRRAGVLSSLSPVNSSNHGPVSTGPLTNRSPIEFPDTADFLNKPSVILQRSLGNAPNTPDFYQQLRNSDSNLCNSCGHQMLKYVSTSESDGTDCCSGKSGEEENIFSKESFKLMETQQEEETEKKDSRKLFQEGDKWLTEEAQSEQQTNIEQEVSLDLILVEEYDSLIEKMSNWNFPIFELVEKMGEKSGRILSQVMYTLFQDTGLLEIFKIPTQQFMNYFRALENGYRDIPYHNRIHATDVLHAVWYLTTRPVPGLQQIHNGCGTGNETDSDGRINHGRIAYISSKSCSNPDESYGCLSSNIPALELMALYVAAAMHDYDHPGRTNAFLVATNAPQAVLYNDRSVLENHHAASAWNLYLSRPEYNFLLHLDHVEFKRFRFLVIEAILATDLKKHFDFLAEFNAKAK

SEQ ID NO: 1896 - DNA, 1834 bp, Homo sapien
atttttagataatcattaaagaccacagaaaatgtaacagatcctactcttcaaaataattgctattcagtattaaaacgagcagtcagctgcgtgattcccgtgattgcgttacaagctttgtctccttcgacttggagtctttgtccaggacgatgagacactcaaagagaacttactgtcctgattgggatgacaaggattgggattatggaaaatggaggagcagcagcagtcataaaagaaggaagagatcacatagcagtgcccaggagaacaagcgctgcaaatacaatcactctaaaatgtgtgatagccattatttggaaagcaggtctataaatgagaaagattatcatagtcgacgctacattgatgagtacagaaatgactacactcaaggatgtgaacctggacatcgccaaagagaccatgaaagccggtatcagaaccatagtagcaagtcttctggtagaagtggaagaagtagttataaaagcaaacacaggattcaccacagtacttcacatcgtcgttcacatgggaagagtcaccgaaggaaaagaaccaggagtgtagaggatgatgaggagggtcacctgatctgtcagagtggagacgtactaagtgcaagatatgaaattgttgatactttaggtgaaggagcttttggaaaagttgtggagtgcatcgatcataaagcgggaggtagacatgtagcagtaaaaatagttaaaaatgtggatagatactgtgaagctgctcgctcagaaatacaagttctggaacatctgaatacaacagaccccaacagtactttccgctgtgtccagatgttggaatggtttgagcatcatggtcacatttgcattgtttttgaactattgggacttagtacttacgacttcattaaagaaaatggttttctaccatttcgactggatcatatcagaaagatggcatatcagatatgcaagtctgtgaattttttgcacagtaataagttgactcacacagacttaaagcctgaaaacatcttatttgtgcagtctgactacacagaggcgtataatcccaaaataaaacgtgatgaacgcaccttaataaatccagatattaaagttgtagactttggtagtgcaacatatgatgacgaacatcacagtacattggtatctacaagacattatagagcacctgaagttattttagccctagggtggtcccaaccatgtgatgtctggagcataggatgcattcttattgaatactatcttgggtttaccgtatttccaacacacgatagtaaggagcatttagcaatgatggaaaggattcttggacctctaccaaaacatatgatacagaaaaccaggaaacgtaaatattttcaccacgatcgattagactgggatgaacacagttctgccggcagatatgtttcaagagcctgtaaacctctgaaggaatttatgctttctcaagatgttgaacatgagcgtctctttgacctcattcagaaaatgttggagtatgatccagccaaaagaattactctcagagaagccttaaagcatcctttctttgaccttctgaagaaaagtatatagatctgtaattggacagctctctcgaagagatcttacagactgtatcagtctaatttttaaattttaagttattttgtacagctttgtaaattcttaacatttttatattgccatgtttattttgtttgggtaatttggttcattaagtacatagctaaggtaatgaacatctttttcagtaattgtaaagtgatttattcagaataaattttttgtgcttatga

SEQ ID NO: 1897 - protein, 484 aa, Homo sapien
MRHSKRTYCPDWDDKDWDYGKWRSSSSHKRRKRSHSSAQENKRCKYNHSKMCDSHYLESRSINEKDYHSRRYIDEYRNDYTQGCEPGHRQRDHESRYQNHSSKSSGRSGRSSYKSKHRIHHSTSHRRSHGKSHRRKRTRSVEDDEEGHLICQSGDVLSARYEIVDTLGEGAFGKVVECIDHKAGGRHVAVKIVKNVDRYCEAARSEIQVLEHLNTTDPNSTFRCVQMLEWFEHHGHICIVFELLGLSTYDFIKENGFLPFRLDHIRKMAYQICKSVNFLHSNKLTHTDLKPENILFVQSDYTEAYNPKIKRDERTLINPDIKVVDFGSATYDDEHHSTLVSTRHYRAPEVILALGWSQPCDVWSIGCILIEYYLGFTVFPTHDSKEHLAMMERILGPLPKHMIQKTRKRKYFHHDRLDWDEHSSAGRYVSRACKPLKEFMLSQDVEHERLFDLIQKMLEYDPAKRITLREALKHPFFDLLKKSI

SEQ ID NO: 1898 - DNA, 1590 bp, Homo sapien
gggagcacagaaaaactcacactggagagaaaccttataaatgtaaggattgtgggagagccttcactgtttcctcttgcttaagtcaacatatgaaaatccatgtgggtgagaagccttatgaatgcaaggaatgtgggatagccttcactagatcttctcaacttactgaacatttaaaaactcacactgcaaaggatccctttgaatgtaagatatgtggaaaatcctttagaaattcctcatgcctcagtgatcactttcgaattcacactggaataaaaccctataaatgtaaggattgtgggaaagccttcactcagaactcagaccttactaagcatgcacgaactcacagtggagagaggccctatgaatgtaaggaatgtggaaaggcctttgccagatcctctcgccttagtgaacatacaagaactcacactggagagaagccttttgaatgtgtcaaatgtgggaaagcctttgctatttcttcaaatcttagtggacatttgagaattcacactggagagaagccctttgagtgcctggaatgtggtaaagcatttacgcattcctccagtcttaataatcacatgcggacccacagcgccaaaaaaccattcacgtgtatggaatgtggcaaagcctttaagtttcccacgtgtgttaaccttcacatgcggatccacactggagaaaaaccctacaaatgtaaacagtgtgggaaatccttcagttactccaattcgtttcagttacatgaacgaactcacactggagagaaaccctatgaatgtaaggagtgcgggaaagccttcagttcttccagttcctttcgaaatcatgaaagaaggcatgcggatgagagactgtcagcataaggaatgtgggaaaacctaaaggtgtccctgttctctctgaagacatgaaaactcactggggagaaaccctatgaatgtaaaaatgtggaagcaactttgtatctcaggtcttaatgaacacatatgaattcacagtggagaagaccctgcatcagggaatgtggaaatgactttgctgaattctcaagccttaccaaacacatcagaaatctcactggagagaaaccgtatgaatgtagagaatctgggaatacctttctgaatcccacaaaccttaatgtgtgtatgtgaactcacattggagagaaaccctgcaatttaaatggtatggtctggatgatgccccactccatatttgtaagccctaagtcctagttccttacactataactgtatttggacatagggttttcaaacaggtgagtaacttcaaatgaggttgttgggttcgatccctaatctgacatcactggtgtccctataagggaaactgaaggaaggatacacatggagaagactgtgtggatccaccagaagatggccatctacaagccaaggacagagacctggaacagatgctttcattatggcctccagaggaaaccaaccctgtctccaccttgatattgcacttccaggctccagaactgtgaggcaataaatttctcttggttaaaccaaaaaaaaaaaaaaaaaaaaaaaaaaa

SEQ ID NO: 1899 - protein, 263 aa, Homo sapien
MKIHVGEKPYECKECGIAFTRSSQLTEHLKTHTAKDPFECKICGKSFRNSSCLSDHFRIHTGIKPYKCKDCGKAFTQNSDLTKHARTHSGERPYECKECGKAFARSSRLSEHTRTHTGEKPFECVKCGKAFAISSNLSGHLRIHTGEKPFECLECGKAFTHSSSLNNHMRTHSAKKPFTCMECGKAFKFPTCVNLHMRIHTGEKPYKCKQCGKSFSYSNSFQLHERTHTGEKPYECKECGKAFSSSSSFRNHERRHADERLSA

SEQ ID NO: 1900 - DNA, 1601 bp, Homo sapien
ggaaacatgcagcatgtagtaatttatgacagcttctttcacttagcatgaggttttcaaagttcattgatgtggtagcatttgtcagtactctgtgcctttttatggctgaataatattttatcatatggatttaccacattttatcattttatttatccatcatcagttgattgacatttgagttgcttctactttttgagtattatcaataattctgttatgaacattcttgtacaattttttggtagacatttatcttcatatttcttggatatatacctaggagcagaattgctgcgtcagatggtaatgctgtttaaccttttcaggaactgtcagactgttctgaagtgggtacattattttacattccaaccagcagtgtatgagaattccagtttccccacatcctcatcaacagttgttattgtctgtcttttttattatattcatctgtaatgtgaagtgtttatctcattgtggttttgatttacatttccctgatggttgatgattttcaacatcttttcatatacttattagtcattatgtatcttctttggagaatgtctgttcagatcctttacctactttataattggtttatctttttaatattgaactgtaatagtttttaaaaaatatatcctaaatacaagtctcttatcagataatatgatttgcagatattttctgtcattctatgtactgtcttttcacattcttgatgatagacttttcagcccaaatgtttttaacttgatggaatacaatttattttttcttttgttgcttgtgctttcagtcatatttgtgaaaactttgcttatcccacattacaaagatttactatttctaagtgatttataattttaccacctacctttaggtctctgatccattttgagttaatttttatgtgcgaggagggagtctaacttgattcttttacatgtggatatttagttgtcccaggaccatttgttgaattaagtgcccagaacaagtacatctatatatagagaaagtagattagtggttgtcagagactgtaagaagtggggaattggagagtgactgcccataggtacaggcatgctttttggcattatgaaaatattctggaattaggtagtggtgatggttgcagaacttttggaatatggtaaaagacactgaaatatatgcttaaaaatggtgatttttgtgatatatgaattatactatagaactaataataacagtaataaagcaaggtgtctttccacatctccatgccttgtattttcattaaaaaaaaaaaaaaaaaagcatttcagggccaggctcagtggtttactcttgtaatcccagcacttttggaggcctaggtgggaggatcacttgaggccagaagttcaaaaccagcctgagcaacatagcaagaccttgtctccatgaaaaataaaaaattagccagaaatggtgatgtgtgcctagagttccaactacttggaaagctgaggcaagaggatcgcttgagcctaggagttcaaggttgcagtgatctataatcaccactgcactccagcctgggtgacagaacaagaccctgtctc

SEQ ID NO: 1901 - DNA, 6467 bp, Homo sapien
aaaactcaaggttttctcacgatgagtcggaggaggatatcgtgtaaagatctgggccatgctgactgccaagggtggctgtataagaaaaaggaaaagggaagtttcctaagcaacaaatggaaaaagttctgggtgatactgaaggggtcgtcactgtactggtatagcaatcaaatggcagagaaagctgatggatttgtcaacctgcctgatttcactgtggaaagagcatctgaatgcaagaaaaagcatgcttttaagatcagccatccacagatcaagaccttttattttgcagctgagaatgtgcaggaaatgaacgtgtggttaaataaacttggatcggctgtaatccatcaggaatccactacaaaggatgaagaatgttacagtgaaagtgaacaggaagatccagaaatagctgcggagacaccaccccctcctcacgcttcccagactcagtctttgactgcacagcaggcatcttcatcctcacccagcctgagtggaacgtcgtattctttctcttccctggaaaatacagtgaagacacccagcagttttccttcctccttatctaaagagagacaatccttgcctgacacagttaacagtttgtctgctgctgaagatgagggacaaccaataacgtttgctgtgcaagttcattcacctgtaccctcagaggcaggcatccacaaggccctggaaaacagttttgtcacatcagaaagtggatttttgaactctttatctagtgatgatacttcttcattgagtagcaatcatgaccatcttactgtcccagataagcctgctggatcaaagatcatggacaaagaagagacaaaagtgtctgaagatgatgaaatggagaagctgtacaaatcattagagcaagctagtctatctcctcttggggaccgacgaccttcgactaaaaaggagttgagaaaatcctttgttaagcggtgtaaaaatccatctataaacgagaaactccacaaaatccgaacattgaatagcacattaaagtgtaaagaacatgatctggccatgattaaccagttgctggatgacccgaagctgacagccaggaaatacagagagtggaaagtcatgaacaccctgctgatccaggacatctatcagcagcagcgggcttcgcctgcccctgatgacactgatgacaccccccaggaactcaagaaatcaccttcttctccctctgttgaaaattccatttgagacaaagtcagggttttctcctcttatattttatcacaagcaactcttcaagatgttgcaaaagcttacatttttccttaaaaggaaaactgaaacccagtccttcaagcatcagcttcccatctaaagatgcacgttagatgaagataatcaccgaatacaccagggctcctcatttcagtcgtaacgcatccattgagattggaatgattgagttcagttgaaaggcgttttttgtgttcctactgggagctcacggtgatgtggggctctaggggggatgtgagaaatgtctcttctgttcattgctctccagagaatgctatggacaagaatcaaattttaccaggagtaattgcccatggaaacattctgtttttcaaaagaagaatgtacatattccacttgactgggaagctgtgtggcccaaatcactgtttgagtggaggaatgttttctagagcagtgactggaaggacaaacgtggtgttgcagaacaaaaattccttgcctttggtatggaatggtggtgccttttccatgtgatgagaaatgcttcatagacagtggcatgtgggagagctgaaggaggaggcgtgttccatattccactcattcaaaggacagcttggtgttttcacactttatgcaggttaggggatctgattaatgtttcctttccttacaacagctagagaaaacatctcatcacaattggagacctctacttcctttgagctttcctactcaatggtaggagataggaatatgttccgcaaagaatgtctactgctcttgtccttggctgtgatccctatacatagtgtgaatttatatccaggtttcccaggatcaatattgacaagacgactttggcatctgaattgttttaatatctttactcaaaaaaacaaaaaaacaaaaacccatggaagcaacaaaagagttaaacatgagggatttatttttgtatgtttatatgtcacttgtgtgctatgtgaatagctatgtttgttatttaaatatatttatagaagttcaaattactagtgtttaaaagatgatatactattatatattgtgcttagtatatatttgatgagtctatactttttgcttgagaaaaatagaaatactattgattcactggtgttatgatgttgcactgtgtctgaggaatgctcaggaaatcttgtgggaaaaaaatggggcatgcattcataatttttcattttcttccccaccccaacccccatgagctcttaaatttagatttctatctcttgtaagtcactcttttaaccagcaaaggactttcatcttagattatcctttctattaaataaactttaagctttgtgccatttatgcctgcaaaccttagaccaaaggcaacacaactaatgtcatcttttcattaaagactaatagaaatttagaaatcattgtgttaaagagagctatagagaaacaatatgaaagtcttcccttactaatcaccatgaatatttctcaccataggaataaccacaacccaccaagtacccatgttggccctgcctacccgtaacaaattgttcacacaacctattttgttttatagcttcaaagtgtggcttgacattcaatggaaggaaccacctgaattatatctgcaaacaaaatggaaatagttgttgaatagttccccaagctttactaagaagccttaatactctgtaaacaaacaaacaaacaaaaaacaaccttagcattaagaaataaaaacaaaaaacaagaagcaagttgtactgctagaaacttctctaagataagaggccaggccagtcagtttggcccagcaaacatgtgggtacttctccacctagggaagccactgaagatgagtttgacctgtggtgacctgacagagagaacattcagatcctcagattgcaccctgatgccctggtttaggaaagcagtgctttaaccttttgcccctggaaattactgattctttctgtgattagcagataccagaagggaaattatttaggattggcaatgtaaagagtattgaaggaacaacaaataacaatagcagaaataacagtgtgacataaagtgcccttccacctatttttctttggtttgcaacaccagcctgtagacttccagtttttcttaaattgaagagctccagacacttttgagcagggtttgtgaatagctttgaatgctttcctttggcttttcgtgaagacatatttccccagcctttcaactgtaaactcctttagtaccattgaaacttaaggcaaaaaagatccctgggattacttagccaaggcttaaatttatttttcaaagtcaagaacattagcctagaagtttttgctttgctagttaaagcttactttgcagagcttcccaaagtgaaagggaaactgaacttcacaattttgcacctggctttctggagccccattgcctgctcattcgtgtttttccccctgtaaattattttgcttttgaccaggttgtgctagaaagtagggctgcttctgtgagttctcagcctaggctgtggccactaagacgtgggtggggggatagacaggagtgagagggagagtgggtgacactttccgtgacacttaatgtaggaagacatgggcttctctctcttggcctcaagccacttttctggtccaaagaatattgggaaaactggattactttcagtatatttcttgagaccgggtcatctctgaaatgcatttggggtagtttcctggggtccaagggccaattcctatacccagtcctgcagtgtctgtgagctgtggaatgagagagaaaaccatggctgctcaggaaggaagtggagaatctctcagcacacgtagatccaaatctgtggcacctgctaaagattaggatttggagaggactcctctttggggttgtgaagaggaccttttccctctgttgttagcctgtagatccagaacggagcctgatgtgatgccttcactggttgatatattgcaaatagacactctgagccctgcattgcaagggcgtcttttgctttaaagaattcttagttttgccacaacagctcaaatctcagaataggatcaaaggcctagaaagactcctaaagtataggattacaaagactccaggaagcgtaagaaagagattgtgtttggagtcagatttcaatgtgaaacccatgccttacatttacacagcactttgtagtttgcaaattggtgtgttttcagccccctcccgctgccccatgctctgagatgattgtggattattacagtgaagtgcctggcccggagcccccagtgatgaagcaggaacttgagtctcaggactcccagcggctctctgcccatttcctcctctccgccccccacctcgcttcacctgttaccttgtgaagttgctgttggcacatagcccactaggaaaccaagaagtttgactgggagcgtgtgtttcattgcactgggcttagcatacggctggccctggtggctgtttggctaaattctccatttgaaacctaaagggccctctctgtgcttgagcacagtctcctcctagtggtcctgcctcaacctgctggcgggctgtctatggattggggtttcacctaatcatgctgtgtttcctttcttttctttctgtacattagactacttgggaggtgctgtgtgatccttggatgaaaaacatatatttaaagaaatggagagtgtttattttgtttgctttttgaggcatgtgctgtcaaatgttagagaccaaacttagtgattagaggttggtcctttgaccttcttctcttaattgcttttcatgtaatcatgataatttactcaggtagcactccagtcacaaacaatgtcacagagatgaaacagattcaaagaaaaaatatttttaagtcttttgaaaagaagtgctattcaaatttaagacatgtttaaattcataggtacattatctcttagtaagaaatacttttttttttctttttttagacagagtcttgctctgttgcccaggctggagtgcagtggcacgattttagctcactgcaacctctgcctccctggttgaagtgattctcctgcctcagcctcccgagtagctgggactacgcccggctaatttttatatttttagtagagaccggggtttaccatgttgcccaggctggtttcaaactcctgacctcaggtgatctgcctgcctctgcctcccagagtgctgggattacaggtgtgagccaccacacctggccgaaagacagtattttgatatagccacatacatgatttaatgagtaatgttaagtacagaaaagctgccatatccacatagttttagggggcatttcttcttcagtctaacaagaatatgatatccaattgtggttttccaatttatttctcttccaatttcttttgtatacctcacaggagaaattgaatcctagaactgggagatgactgccctgcccagggttttgtaatacataattgaaaataaaagtccctgaaactaaatgtttgcagcctgtatgaaatggactgtggaagggggataatttctctcctcacagaaagccactcgtctccttgaatgaggcattgagcagacacacgtttctctgtgtcgtggggcaggaagcaattcccttgcctcttcagcacatctcagttctttcccacatgaccccagaaccacatagaaaacattgaaaataatggattcttcattgtatttgaattttttttttttaacctttagcccaaaagggaagtgtgcctcgtggaaagagcaaatgccgtaaaatagaaaccaggagttttaatcgccatatattttaatgtgcttgcatgatgggaatgtgacttttagcactgcatggtgtttgggggcaagatattaatgtggaaatcttagcttaagttttactgtgctctcatcctgtgtcagctacccctctaaactgaaaaagaggcatggctcatttctctcctgctttatgtttttgaggttgacttgtaagataaaaataaaaataagaaaaaaatatatctaggcaaatgacatgaaaaaaaagttgaaatatactactggtgttcatttttgtcctgcagtgttgctttctcaaagaaataaacatgtggctggaagtgttt

SEQ ID NO: 1902 - DNA, 2748 bp, Homo sapien
cgggaataactatattgacatatttatttggcgagaaccaattaacagcagctggctaaatgtaactcacccaggacagaaggggaagtggaggggggtggtctgtgtgtggatggaggtgggacgagtggcgtacatggagagtcaggtgttccctcccccaattcatttagcagccccagaacgtgtccgattttaactttaatgaaactttaagtacataaataaccactctttcctgccctggttgaggccgcgctgggtccgggaaatatctgctttccaacggggcacctgggtgggagccttccaagaacttcagctcagcggttcccagcaagggttcgctgagtctctgtcctaggaggtccgagctgggtatgctgtgcggacgcagacactgcgggaaggaaacaggtgtcccgcggcggccaaaccttcgggcagcagcccaggtcgccttgctcaccccaggcggtctcatggcacgggcctctcgaaactgtgggcaagaaagggtcctcgtgagaactaggctcagaagaagagcgggggcggcgccacctcggggggagcggaccaggctggggccgcaagggcggcgtccggggccgcgtgggcggcttcgccgtgaatgagctggtgccgcaccaggtgggtcttgcggctgaagctctttccgcactgcgggcaggagaaggggcgggagcctgtgtggatcgcctggtggcggactaggttggttttggagctgaagctgcgggcgcagacggcgcaggcgtgggggcgactgccagtgtgcaccgcctggtggcggcccaggtgcgacttgcggctgaagcggcggccgcactgagcgcaggcgaaaggcctggcgccgctgtgggccctggagtgggcgaccagattaggccgcgagccgaagcggcggtcacactgcgtgcaggcgaagggccgttcgcccgtgtgcacgcgcgggtgccgcgccaggtgctgcccatgggagaagccgcgcccgcagtccgggcagaagaaggaccgctcgcccgagggggcgcgctggggcaccacgggatcggatcctgggccgcagcccggtccgccaggcgcgctggccaggggcttggcggcgggggcatccacggtggcgcccagtgcgcactcatcgcacccaaaggggcgaccctcgctgcggtgcagacactggtgcgtggcgaggttctttttccagccgaagctcaagccgcagtcggagcacgcgaaaggctttggcccgggaaaggatggggtcggggacggggcagtggaatgaggagaagcggacgagtcgggagagggcctggccgggccggccgtctggtgcaccctttggtgccgcaccaagtgctgcttgtgcgtgaagctgcgtgcgcactgtgcgcactggtagggcctctcgcccgtatggatgcgctggtgccgaatcaagtgcgtcttcttgcgaaagcgcttctcgcattccgtgcaggggaagggccgctcgccggtgtgggtcttttggtgcgagcccaggtggatcttctggctgaagcgcttgccgcactccgcgcacgggtagggccgctcgcccgtgtgcgtgcgcaggtggcgggtcagatgggccttcttgctgaagcgcttgtcgcactcggagcacgggaaaggccgctcgccgcggtggctgcgctgatgcagtagcatgtgggcgcgctgcgtgaagctgcggccgcagtccgggcaggcgcaggggccctcgccccggtgcagccgctggtgcagtcgcaacgtcagctggtcccggaagcgccgctcacactccccgcagccgtagggcttctccggcatcggaccccacccagacagcgcgagcccactcagtgcccccggggcccctggctccagtttgtacgcggcagccagatgccccaggtcaggcgcgggaaaggggctgggaagtaacgatagatgctggggccattcgacctcctcttctgcctcctgatcttcgtcctccaccttcaccttccgaatcatccactcctctcctgggcaggtacccacaggctgagccttctgtgctgagcacgcctggcctctgcagggagcctcggcttgttctgtgtgggcaccttcctccggtgtaggggcctcgtgccctgagcacacccccagtgctctctcttccctagaagaggacatctgctcctgggcattatgggatccttccctgggctcactttggggggccatctctggctgtcccacagagaatcccagggagctgagggcctccaaggtctctctccggggtgaaccacgagatatacgttctctctctgggagacacaggcacacagaacctggcaggtctgtcaccgccaaccccggcccatcagcaccgcaactccacgccccagcgtccttgcctgggaaagtgcaggcaagattcgattctctggggagaggcttgagggtgggagcccagggtggggagtgggaaacttcatctcccaggtcctccagctgtcactgcccgagctggtgaaataggagccagcccaggggcgggagtgagtgtcactttaggggtactgcttggggaggtcctcgagaggatcctcttgtagctagaaaatgatcgcctcttcctaaacccctaccacaaaaccacctctcacccgtgccgggctgcccaaggcccggacaccgcccctgctgccccttccctgc

SEQ ID NO: 1903 - protein, 135 aa, Homo sapien
MRRSGRVGRGPGRAGRLVHPLVPHQVLLVREAACALCALVGPLARMDALVPNQVRLLAKALLAFRAGEGPLAGVGLLVRAQVDLLAEALAALRARVGPLARVRAQVAGQMGLLAEALVALGARERPLAAVAALMQ

SEQ ID NO: 1904 - DNA, 3082 bp, Homo sapien
atttggagtcaggcctggctgttgctcaggtgaccagcttgtgtctctgggagggcgctgctttccccggccacccggcgcgatgatccagaatgtcggaaatcacctgcgacggggcttggcctctgtgttctccaaccgcacatcccggaagtcagccttacgtgcggggaacgacagtgccatggcagacggcgagggataccggaaccccacggaggtgcagatgagccagctggtgctgccctgccacaccaaccaacgtggtgagctgagcgtcgggcagctgctcaagtggattgacaccacggcttgcctgtccgcggagaggcacgctggctgcccctgtgtcacagcttccatggatgacatctattttgagcacaccattagtgttggacaagtggtgaatatcaaggccaaggtgaaccgggccttcaactccagcatggaggtgggcatccaggtggcctcggaggacctgtgctctgagaagcagtggaatgtgtgcaaggccttggccaccttcgtggcccgccgagagatcaccaaggtgaagctgaagcagatcacgccgcggacagaagaggagaagatggagcacagtgtggcggctgagcgccggcgcatgcgccttgtctatgcagacaccatcaaggacctcctggccaactgcgccattcagggcgatctggagagcagagactgtagccgcatggtgccggctgagaagacccgtgtggagagtgtggagctggtcctgcctccccacgccaatcaccagggcaacacctttgggggccagatcatggcctggatggagaatgtggccaccattgcagccagccggctctgccgtgcccaccctacgctgaaggccattgaaatgttccacttccgaggcccgtcccaggtcggcgaccgtctggtgctcaaagccatcgtgaacaatgccttcaaacatagcatggaggtgggcgtgtgcgtggaggcctatcgccaggaggctgagacccaccggcgccacatcaacagtgcctttatgacctttgtggtcctggacgcagatgaccagccccagttgctgccctggattcggccccagcccggcgatggtgagcggcggtaccgagaggccagtgccagaaagaagatccgcctggacaggaagtacatcgtgtcctgtaagcagacagaggtgcccctctccgtcccctgggaccctagcaaccaggtgtacctgagctacaataacgtctcctccttgaagatgcttgtggccaaggacaactgggtgctgtcctcggagatcagtcaggtccgcctgtacactctggaggatgacaagttcctctccttccacatggagatggtggtgcatgtggatgcagcccaggccttcctgctgctctcggacctgcgtcagaggccagagtgggacaagcactaccggagcgtggagctagtgcagcaggtagacgaggacgacgccatctaccacgtcaccagccctgccctcggaggtcacacaaagccccaggacttcgtgatcctggcctcaaggcggaagccttgtgacaatggggacccctatgtcatcgcgctgaggtcggtcacgctgcccacacaccgagagacgccagagtacagacgcggagagaccctctgctcaggcttctgcctctggcgcgagggggaccagctgaccaaggtatcctactacaaccaggccaccccaggtgttctcaactatgtgaccaccaacgtggccggcctctcctctgagttctacaccaccttcaaggcttgtgagcagtttctcttggacaaccggaatgatctggcccccagcctccagaccctctagatgccctcagtggccacatcatgcccactcccactccatcctgtccccaaggactcacatacagtgcctggagaaagccaaagacctttatttcttcctgcctccccgtgggaagcctccgccctgaggtccgctggcccaccacccctgggtgctcagtttctaccaacatgagccagcaagtccttgtggtagccctggggtagcctgtagtagactcgggtcctgtccacagccctagctgccagcaatgctgtcctcacagaggcatagtcgcccccagctgggttgtgctccactgtgacggtggcccggggggaggatgccagcagcctggctatggctccagctgtgctgtggcccagcagcatggcctgcatctggaaggacacaggttgccagagcccctggcacaactctagcatatctgtgagcagctgttccctgtagccactgcccagcacctcctcaggccagcctggtgccacagtcacgtgggggaagacctcagccacagctgtaagcagctctctgccagccacatggccggggaccaaaaaactcccgtgggagattttggccccaacccacacaggccaatgcaagaggccaaggctggagaggcgtgccagcaaggccagggatggccggagggctgcgggctccgctatttgcaaatggatgccccagtgtccgggatgtgtggccagctgctgcaggcaggactccagcgtcaggatgttgccacttggagtatgaacaatgggcacggggttttcagccacagttccctcgaggccagtgttcagcaggatcatgccttctgtgtctggaagaggcggcagaggcaacagtgtttaggatttgggttatcataaggtgttaagagtcccttgttaaaggggcagtgggagttatggggtcatcaaggaccttgcctctctggaatctgtcaacccagttttgggctccaggtggatgggttgctttataaatgtgcctggtgcatgagaaactcttgtttcagctcttggcctttacccatgactcagcctgggggctggtgccggccttgcctgcagcaatgtagctgaggactggtctgaaggccaggagccctgtgctcttgacatcactgtactccctctccctccccgcaaccctgccccaccttgcatccagggtatggtgtaaataaacctgtgttgccatggc

SEQ ID NO: 1905 - protein, 594 aa, Homo sapien
MIQNVGNHLRRGLASVFSNRTSRKSALRAGNDSAMADGEGYRNPTEVQMSQLVLPCHTNQRGELSVGQLLKWIDTTACLSAERHAGCPCVTASMDDIYFEHTISVGQVVNIKAKVNRAFNSSMEVGIQVASEDLCSEKQWNVCKALATFVARREITKVKLKQITPRTEEEKMEHSVAAERRRMRLVYADTIKDLLANCAIQGDLESRDCSRMVPAEKTRVESVELVLPPHANHQGNTFGGQIMAWMENVATIAASRLCRAHPTLKAIEMFHFRGPSQVGDRLVLKAIVNNAFKHSMEVGVCVEAYRQEAETHRRHINSAFMTFVVLDADDQPQLLPWIRPQPGDGERRYREASARKKIRLDRKYIVSCKQTEVPLSVPWDPSNQVYLSYNNVSSLKMLVAKDNWVLSSEISQVRLYTLEDDKFLSFHMEMVVHVDAAQAFLLLSDLRQRPEWDKHYRSVELVQQVDEDDAIYHVTSPALGGHTKPQDFVILASRRKPCDNGDPYVIALRSVTLPTHRETPEYRRGETLCSGFCLWREGDQLTKVSYYNQATPGVLNYVTTNVAGLSSEFYTTFKACEQFLLDNRNDLAPSLQTL

SEQ ID NO: 1906 - DNA, 3898 bp, Homo sapien
tcttcatgtaccagatgctgaaatactatgagataaagattttaggtttcaattgtaaagagagagaagtggataaatcagtgctgctttctttaggacgaaagaagtatggagcagtgggatcactttcacaatcaacaggaggacactgatagctgctccgaatctgtgaaatttgatgctcgctcaatgacagctttgcttcctccgaatcctaaaaacagcccttcccttcaagagaaactgaagtccttcaaagctgcactgattgccctttacctcctcgtgtttgcagttctcatccctctcattggaatagtggcagctcaactcctgaagtgggaaacgaagaattgctcagttagttcaactaatgcaaatgatataactcaaagtctcacgggaaaaggaaatgacagcgaagaggaaatgagatttcaagaagtctttatggaacacatgagcaacatggagaagagaatccagcatattttagacatggaagccaacctcatggacacagagcatttccaaaatttcagcatgacaactgatcaaagatttaatgacattcttctgcagctaagtaccttgttttcctcagtccagggacatgggaatgcaatagatgaaatctccaagtccttaataagtttgaataccacattgcttgatttgcagctcaacatagaaaatctgaatggcaaaatccaagagaataccttcaaacaacaagaggaaatcagtaaattagaggagcgtgtttacaatgtatcagcagaaattatggctatgaaagaagaacaagtgcatttggaacaggaaataaaaggagaagtgaaagtactgaataacatcactaatgatctcagactgaaagattgggaacattctcagaccttgagaaatatcactttaattcaaggtcctcctggacccccgggtgaaaaaggagatcgaggtcccactggagaaagtggtccacgaggatttccaggtccaataggtcctccgggtcttaaaggtgatcggggagcaattggctttcctggaagtcgaggactcccaggatatgccggaaggccaggaaattctggaccaaaaggccagaaaggggaaaaggggagtggaaacacattaactccatttacgaaagttcgactggtcggtgggagcggccctcacgaggggagagtggagatactccacagcggccagtggggtacaatttgtgacgatcgctgggaagtgcgcgttggacaggtcgtctgtaggagcttgggatacccaggtgttcaagccgtgcacaaggcagctcactttggacaaggtactggtccaatatggctgaatgaagtgttttgttttgggagagaatcatctattgaagaatgtaaaattcggcaatgggggacaagagcctgttcacattctgaagatgctggagtcacttgcactttataatgcatcatattttcattcacaactatgaaatcgctgctcaaaaatgattttattaccttgttcctgtaaaatccatttaatcaatatttaagagattaagaatattgcccaaataatattttagattacaggattaatatattgaacaccttcatgcttactattttatgtctatatttaaatcattttaacttctataggtttttaaatggaattttctaatataatgacttatatgctgaattgaacattttgaagtttatagcttccagattacaaaggccaagggtaatagaaatgcataccagtaattggctccaattcataatatgttcaccaggagattacaattttttgctcttcttgtctttgtaatctatttagttgattttaattactttctgaataacggaagggatcagaagatatcttttgtgcctagattgcaaaatctccaatccacacatattgttttaaaataagaatgttatccaactattaagatatctcaatgtgcaataacttgtgtattagatatcaatgttaatgatatgtcttggccactatggaccagggagcttatttttcttgtcatgtactgacaactgtttaattgaatcatgaagtaaattgaaagcaggacatatgagaaaactgaccatcagtatatttgtccagataactggtggatcaaaaatgccacttaacaggaagtttagtttgttatgcactttaaatggaataattagcttgttacaattctaggacatggtgtttaaaatttaaatctgattaatccattttaacaaacaatgcaaacattttcagtgcagaaggaagagtggtttcaactgtttggagtcttttatgaagtcagtcaacatttacaaccaaagggcggggtcgggggggggtgcgtctttagtcctaaagggacagtaactctgagcatgccccaaaaaagtagcttagcaaccttttgttggtagtcaacccatccccagggccatagtgtagagtgtgaaaagctacccggaagcccagtaattctaccctgaaagtgactgtctgcagaaagaccagtagttgatattaaagcgcaaatgaattcaacctcagccctgaaaataacagaattctgaagtttcctatgactaattcacaaaaaaagtaattgtaaactagtactattatggaattactctactgttctttctttaatagtggcaaatgaaagcataagcttaagcattttttcatattctgaagtctcaccacacataataaccaagtggtagactcacagccgtccaacttaaaaaggcaaaaccttaccttggaattggaattactgtaaacagcctactgaaaatgcatttttatcatgtaacattcttctacttgtttaacattgctgattttctctggcagcataattttgtggttaagagaatgaattctgaatgtacactttctgtctcaaaccctggctgtaatttcagctagttaataattctttgtgttcagttccactatctaggtattttcttcaaaaggtaaatacaatggtttctgaaagaatcatttgcattatcagcctgtttgggatgtctgagatcagtgcctctgggttgttaatactgtattgctgtatggtatatgtatgctgatttactacttatgcgtaagtggtatgcatgggatgtctgaaatcagtgcctatgggttgtcaatagtattaactattagtgttaactgttagtattaactattagtattattaacactaataatagtactattactattactatttttattttaaaataaaatttacctttaaaataataatagtgctattgctagtactagtactattgctattactagtgctattactagtactagtactatgacactgttaatagtactattaacaacccataggcacttgggatgtctgagatcagtgcctatgggttgttaatactatattgctgtatggtatatgcatgctgatttaccacttatgcatagatatatctttaataagtaatctaaaaatcctttttgtatttgagagaatctactaagttcagtccagtcaagaaaagaacctaatagcaccaatacaaattgaggacttaatttactttggaatgttgaattgcatttgttccattaaaaaaaacagaaatttgcgatttggtttttttgaaaaaatagctcagctgaccagaatgaatgtattctacttgttgagccatccagcatcacgttaaatgcaaaatgtatatataaataaaagaagaagaaaaaagaaagaccaaagggatgtagaaaatgaagaataaccattaatatctaagggccaaacacattccacctaaattatctaaatagtttcaaataaaactttccattttttcaaaac

SEQ ID NO: 1907 - protein, 487 aa, Homo sapien
FMYQMLKYYEIKILGFNCKEREVDKSVLLSLGDERSMEQWDHFHNQQEDTDSCSESVKFDARSMTALLPPNPKNSPSLQEKLKSFKAALIALYLLVFAVLIPLIGIVAAQLLKWETKNCSVSSTNANDITQSLTGKGNDSEEEMRFQEVFMEHMSNMEKRIQHILDMEANLMDTEHFQNFSMTTDQRFNDILLQLSTLFSSVQGHGNAIDEISKSLISLNTTLLDLQLNIENLNGKIQENTFKQQEEISKLEERVYNVSAEIMAMKEEQVHLEQEIKGEVKVLNNITNDLRLKDWEHSQTLRNITLIQGPPGPPGEKGDRGPTGESGPRGFPGPIGPPGLKGDRGAIGFPGSRGLPGYAGRPGNSGPKGQKGEKGSGNTLTPFTKVRLVGGSGPHEGRVEILHSGQWGTICDDRWEVRVGQVVCRSLGYPGVQAVHKAAHFGQGTGPIWLNEVFCFGRESSIEECKIRQWGTRACSHSEDAGVTCTL

SEQ ID NO: 1908 - DNA, 7029 bp, Homo sapien
atggcggcggcggcggggaatcgcgcctcgtcgtcgggattcccgggcgccagggctacgagccctgaggcaggcggcggcggaggagccctcaaggcgagcagcgcgcgcgcggctgccgcgggactgctgcgggaggcgggcagcgggggccgcgagcgggcggactggcggcggcggcagctgcgcaaagtgcggagtgtggagctggaccagctgcctgagcagccgctcttccttgccgcctcaccgccggcctcctcgacttccccgtcgccggagcccgcggacgcagcggggagtgggaccggcttccagcctgtggcggtgccgccgccccacggagccgccagccggcgcggcgcccaccttaccgagtcggtggcggcgccggacagcggcgcctcgagtcccgcagcggccgagcccggggagaagcgggcgcccgccgccgagccgtctcctgcagcggcccccgccggtcgtgagatggagaataaagaaactctcaaagggttgcacaagatggatgatcgtccagaggaacgaatgatcagggagaaactgaaggcaacctgtatgccagcctggaagcacgaatggttggaaaggagaaataggcgagggcctgtggtggtaaaaccaatcccagttaaaggagatggatctgaaatgaatcacttagcagctgagtctccaggagaggtccaggcaagtgcggcttcaccagcttccaaaggccgacgcagtccttctcctggcaactccccatcaggtcgcacagtgaaatcagaatctccaggagtaaggagaaaaagagtttccccagtgccttttcagagtggcagaatcacaccaccccgaagagccccttcaccagatggcttctcaccatatagccctgaggaaacaaaccgccgtgttaacaaagtgatgcgggccagactgtacttactgcagcagatagggcctaactctttcctgattggaggagacagcccagacaataaataccgggtgtttattgggcctcagaactgcagctgtgcacgtggaacattctgtattcatctgctatttgtgatgctccgggtgtttcaactagaaccttcagacccaatgttatggagaaaaactttaaagaattttgaggttgagagtttgttccagaaatatcacagtaagcgtagctcaaggatcaaagctccatctcgtaacaccatccagaagtttgtttcacgcatgtcaaattctcatacattgtcatcatctagtacttctacatctagttcagaaaacagcataaaggatgaagaggaacagatgtgtcctatttgcttgttgggcatgcttgatgaagaaagtcttacagtgtgtgaagacggctgcaggaacaagctgcaccaccactgcatgtcaatttgggcagaagagtgtagaagaaatagagaacctttaatatgtcccctttgtagatctaagtggagatctcatgatttctacagccacgagttgtcaagtcctgtggattccccttcttccctcagagctgcacagcagcaaaccgtacagcagcagcctttggctggatcacgaaggaatcaagagagcaattttaaccttactcattatggaactcagcaaatccctcctgcttacaaagatttagctgagccatggattcaggtgtttggaatggaactcgttggctgcttattttctagaaactggaatgtgagagagatggccctcaggcgtctttcccatgatgtcagtggggccctgctgttggcaaatggggagagcactggaaattctgggggcagcagtggaagcagcccgagtgggggagccaccagtgggtcttcccagaccagtatctcaggagatgtggtggaggcatgctgcagcgttctgtcaatggtctgtgctgaccctgtctacaaagtgtacgttgctgctttaaaaacattgagagccatgctggtatatactccttgccacagtttagcggaaagaatcaaacttcagagacttctccagccagttgtagacaccatcctagtcaaatgtgcagatgccaatagccgcacaagtcagctgtccatatcaacactgttggaactgtgcaaaggccaagcaggagagttggcagttggcagagaaatactaaaagctggatccattggtattggtggtgttgattatgtcttaaattgtattcttggaaaccaaactgaatcaaacaattggcaagaacttcttggccgcctttgtcttatagatagactgttgttggaatttcctgctgaattttatcctcatattgtcagtactgatgtttcacaagctgagcctgttgaaatcaggtataagaagctgctgtccctcttaacctttgctttgcagtccattaataattcccactcaatggttggcaaactttccagaaggatctacttgagttctgcaagaatggttactacagtaccccatgtgttttcaaaactgttagaaatgctgagtgtttccagttccactcacttcaccaggatgcgtcgccgtttgatggctattgcagatgaggtggaaattgccgaagccatccagttgggcgtagaagacactttggatggtcaacaggacagcttcttgcaggcatctgttcccaacaactatctggaaaccacagagaacagttcccctgagtgcacaatccatttagagaaaactggaaaaggattatgtgctacaaaattgagtgccagttcagaggacatttctgagagactggccagcatttcagtaggaccttctagttcaactactaactactactacaacaacagagcaaccaaagccaatggttcaaacaaaaggcagaccccacagtcagtgtttgaactcctctcctttatctcatcattcccaattaatgtttccagccttgtcaaccccttcttcttctaccccatctgtaccagctggcactgcaacagatgtctctaagcatagacttcagggattcattccctgcagaataccttctgcatctcctcaaacacagcgcaagttttctctacaattccacagaaactgtcctgaaaacaaagactcagataaactttccccagtctttactcagtcaagacccttgccctccagtaacatacacaggccaaagccatctcgacctaccccaggtaatacaagtaaacagggagatccctcaaaaaatagcatgacacttgatctgaacagtagttccaaatgtgatgacagctttggctgtagcagcaatagtagtaatgctgttatacccagtgacgagacagtgttcaccccagtagaggagaaatgcagattagatgtcaatacagagctcaactccagtattgaggaccttcttgaagcatctatgccttcaagtgatacaacagtaacttttaagtcagaagttgctgtcctgtctcctgaaaaggctgaaaatgatgatacctacaaagatgatgtgaatcataatcaaaagtgcaaagagaagatggaagctgaagaagaagaagctttagcaattgccatggcaatgtcagcgtctcaggatgccctccccatagttcctcagctgcaggttgaaaatggagaagatatcatcattattcaacaggatacaccagagactctaccaggacataccaaagcaaaacaaccgtatagagaagacactgaatggctgaaaggtcaacagataggccttggagcattttcttcttgttatcaggctcaagatgtgggaactggaactttaatggctgttaaacaggtgacttatgtcagaaacacatcttctgagcaagaagaagtagtagaagcactaagagaagagataagaatgatgagccatctgaatcatccaaacatcattaggatgttgggagccacgtgtgagaagagcaattacaatctcttcattgaatggatggcagggggatcggtggctcatttgctgagtaaatatggagccttcaaagaatcagtagttattaactacactgaacagttactccgtggcctttcgtatctccatgaaaaccaaatcattcacagagatgtcaaaggtgccaatttgctaattgacagcactggtcagagactaagaattgcagattttggagctgcagccaggttggcatcaaaaggaactggtgcaggagagtttcagggacaattactggggacaattgcatttatggcacctgaggtactaagaggtcaacagtatggaaggagctgtgatgtatggagtgttggctgtgctattatagaaatggcttgtgcaaaaccaccatggaatgcagaaaaacactccaatcatcttgctttgatatttaagattgctagtgcaactactgctccatcgatcccttcacatttgtctcctggtttacgagatgtggctcttcgttgtttagaacttcaacctcaggacagacctccatcaagagagctactgaagcatccagtctttcgtactacatggtagccaattatgcagatcaactacagtagaaacaggatgctcaacaagagaaaaaaaacttgtggggaaccacattgatattctactggccatgatgccactgaacagctatgaacgaggccagtggggaacccttacctaagtatgtgattgacaaatcatgatctgtacctaagctcagtatgcaaaagcccaaactagtgcagaaactgtaaactgtgcctttcaaagaactggccctaggtgaacaggaaaacaatgaagtttgcatgactaaattgcagaagcataattttatttttttggagcactttttcagcaatattagcggctgaggggctcaggatctattttaatatttcaattattcttccatttcatatagtgatcacaagcagggggttctgcaattccgttcaaattttttgtcactggctataaaatcagtatctgcctcttttaggtcagagtatgctatgagtagcaatacatacatatatttttaaaagttgatacttctttatgacccacagttgacctttattttcttaaataccagggcagttgtggctcattgtgcattttactgttggcccattcatttcgtttttggaaattatggttttgtattttcatgtttatttacattcatttttgtttattcagggaaagctgatctttttttcaaaccagaaaaaaaaaatgaactagatatgaagtagagttcattaaatatcttgctattgtcagagtttttaaaatatagacttaattttgtttttttaaattggaatacaataaagtactacctacatttgagtcagtcaccactcttattgtgcaggttaagtacaagttaactaaaaataaactgtcctctctggtgcaactcacaaccaagatcaagattaccttaaaatttatttgaattttttagatgttttggttgtcaaactgtaggaaacttcacaacatttaagtcttactctgtatgtaacaatccatcattcaccttcactactggtaataacatagagctgccattttccttttaccatgcatcatctctttacagtaggcctggcagatcattttttaaaaagattattcaactaccaatcagtaatgtttttaaacagtacatttgctttgaacttggaaaatgtgttcagaaagaaaaatggaattgaatttcatttatacactaattccttggattttgcacagttacctaacggttttagtctggagttaaattcagatgcatggaatcctgaaggaaaatggtagctttttaatctttttgtgtgtgtgtgagtcttttaaatcaagtactgattaactattaagtacaactttgagattttagttttaactcttcagaagccagtgtgaaatagaattggttattctcaaagactcaggataaactaaataagctatatatagagtacatttaaaatgtacaacacaaattggaagtaaaataagttacaagataagtttacagggatatattgcttacaatttttaaaaggcagtttgttttttatgtgaatatgtttcttagtgaaattttacattcctttgttttggaagattggcgatatttgaagagttaaaaatagtacagaaatgtgaagtttggtatctctaaatgtgttgtacttgactttcttttttatttttttttattttttttgactacttagaattttcacaattctaataagattgtttccaagtctctcatgtgcaagctttaaaggatgcactcttgccattttatgtactggaagatcattggtcagatgaatactgtgtctgacaaaaatgtaaactgtataaactgaggaacctcagctaatcagtattactttgtagatcaccatgcccaccacatttcaaactcaaactatctgtagatttcaaaatccattgtgtttgagtttgtttgcagttccctcagcttgctggtaattgtggtgttttgttttttgttttgttttcaatgcaaatgtgatgtaatattcttattttctttggatcaaagctggactggaaattgtatcgtgtaattatttttgtgttcttaatgttatttggtactcaagttgtaaataacgtctactactgtttattccagtttctactacctcaggtgtcctatagatttttcttctaccaaagttcactttcacaatgaaattatatttgctgtgtgactatgattcctaagatttccagggcttaagggctaacttctattagcaccttactgtgtaagcaaatgttacaaaaaaagacaagaaaaaaatctctgggttaagaaaatttggcttaaatgtatcctttgttattttaaatatattgagatattttaattaaaatttttaccccattgaaccgattttatagtatttgtacctattttggtgtttttgtctttatagtaaataaaagtttttgaacaaaaaaaaaagtcgacgcgg

SEQ ID NO: 1909 - protein, 1512 aa, Homo sapien
MAAAAGNRASSSGFPGARATSPEAGGGGGALKASSARAAAAGLLREAGSGGRERADWRRRQLRKVRSVELDQLPEQPLFLAASPPASSTSPSPEPADAAGSGTGFQPVAVPPPHGAASRRGAHLTESVAAPDSGASSPAAAEPGEKRAPAAEPSPAAAPAGREMENKETLKGLHKMDDRPEERMIREKLKATCMPAWKHEWLERRNRRGPVVVKPIPVKGDGSEMNHLAAESPGEVQASAASPASKGRRSPSPGNSPSGRTVKSESPGVRRKRVSPVPFQSGRITPPRRAPSPDGFSPYSPEETNRRVNKVMRARLYLLQQIGPNSFLIGGDSPDNKYRVFIGPQNCSCARGTFCIHLLFVMLRVFQLEPSDPMLWRKTLKNFEVESLFQKYHSKRSSRIKAPSRNTIQKFVSRMSNSHTLSSSSTSTSSSENSIKDEEEQMCPICLLGMLDEESLTVCEDGCRNKLHHHCMSIWAEECRRNREPLICPLCRSKWRSHDFYSHELSSPVDSPSSLRAAQQQTVQQQPLAGSRRNQESNFNLTHYGTQQIPPAYKDLAEPWIQVFGMELVGCLFSRNWNVREMALRRLSHDVSGALLLANGESTGNSGGSSGSSPSGGATSGSSQTSISGDVVEACCSVLSMVCADPVYKVYVAALKTLRAMLVYTPCHSLAERIKLQRLLQPVVDTILVKCADANSRTSQLSISTLLELCKGQAGELAVGREILKAGSIGIGGVDYVLNCILGNQTESNNWQELLGRLCLIDRLLLEFPAEFYPHIVSTDVSQAEPVEIRYKKLLSLLTFALQSINNSHSMVGKLSRRIYLSSARMVTTVPHVFSKLLEMLSVSSSTHFTRMRRRLMAIADEVEIAEAIQLGVEDTLDGQQDSFLQASVPNNYLETTENSSPECTIHLEKTGKGLCATKLSASSEDISERLASISVGPSSSTTNYYYNNRATKANGSNKRQTPQSVFELLSFISSFPINVSSLVNPFFFYPICTSWHCNRCLKHRLQGFIPCRIPSASPQTQRKFSLQFHRNCPENKDSDKLSPVFTQSRPLPSSNIHRPKPSRPTPGNTSKQGDPSKNSMTLDLNSSSKCDDSFGCSSNSSNAVIPSDETVFTPVEEKCRLDVNTELNSSIEDLLEASMPSSDTTVTFKSEVAVLSPEKAENDDTYKDDVNHNQKCKEKMEAEEEEALAIAMAMSASQDALPIVPQLQVENGEDIIIIQQDTPETLPGHTKAKQPYREDTEWLKGQQIGLGAFSSCYQAQDVGTGTLMAVKQVTYVRNTSSEQEEVVEALREEIRMMSHLNHPNIIRMLGATCEKSNYNLFIEWMAGGSVAHLLSKYGAFKESVVINYTEQLLRGLSYLHENQIIHRDVKGANLLIDSTGQRLRIADFGAAARLASKGTGAGEFQGQLLGTIAFMAPEVLRGQQYGRSCDVWSVGCAIIEMACAKPPWNAEKHSNHLALIFKIASATTAPSIPSHLSPGLRDVALRCLELQPQDRPPSRELLKHPVFRTTW

SEQ ID NO: 1910 - DNA, 438 bp, Homo sapien
gttgtgagaaattaaatgagatcgtacatatcaagtagtaggaaaaatgcctagtacagtgttagaagtttatggtcttgtaggaagcacaaatacagaattaaagcaatgatagaagcattaacatggtacagtcctagcagatgagagaatgcttcattatctttggaggttgggagatatgagggaccaggaagctttcctggaagagcttacattatgacccaatatacattatgacccaacataacacatgtatacacctatgtgcaatgtgtttatacatttatcaatttgtatgtttttactggtttgtgatataaaatggacatgtatatgaaataaaacagaacttagcatcagtatgcatagttctctgtaatattttctagtttcttatactgtgtttcattaaacaaaacaaaacttttaaaaatt

SEQ ID NO: 1911 - protein, 11 aa, Homo sapien
CEKLNEIVHIK

SEQ ID NO: 1912 - DNA, 1873 bp, Homo sapien
gcgcgaccgacgactggagcgcagggcaggggtagaggctcgtagatggaactggtagtcagctggagagcagcatggaggcgtcctgggggagcttcaacgctgagcggggctggtatgtctctgtccagcagcctgaagaagcggaggccgaagagttgagtccgttgctaagcaacgaacttcacagacagcgatccccaggtgtttcatttggtttatcagtgtttaatttgatgaatgccatcatgggaagtggcatccttggcttagcttatgttatggctaataccggtgtctttggatttagcttcttgctgctgacagttgctctcctggcttcttactcagtccatcttctgcttagtatgtgtattcagacagctgtaacatcttatgaagatcttggactctttgcatttggattacctggaaagttggtggtggcaggcaccataataattcagaatattggagctatgtcatcttatcttttaattattaaaacagagcttcctgctgctattgcagaatttttgactggagactatagtagatattggtatcttgatggacaaacactactaataatcatatgtgttggcattgtgttccctcttgcacttcttcccaaaataggctttcttggctacacaagtagtttatcatttttctttatgatgttctttgctcttgtggtaataattaaaaaatggtccatcccttgtcctctgacattaaattatgtagagaaaggcttccagatttcaaatgttacagatgattgtaagccaaagctctttcatttctccaaagagagtgcttatgccttaccaaccatggctttttcatttctctgccatacctcaatattgcccatatactgtgaacttcaaagtccttcaaagaaaagaatgcagaatgttaccaatacagcaattgctttaagttttctcatttattttatatctgcactctttgggtacctcactttttatgacaaagtggagtcagaattactaaaaggttatagtaaatacttatcacatgatgttgttgtcatgactgtgaagttatgcatactatttgctgtgcttttgacagtccctctaatccacttccctgccagaaaagctgtaacaatgatgtttttctccaattttccattctcatggattcgccattttttgatcactctagcactcaatattatcatcgttttacttgcaatatatgttcctgacattagaaatgtatttggtgtagttggtgccagtacatcaacatgtttgatttttatattcccaggactattttatcttaaacttagcagagaggattttctgtcatggaaaaagcttggggcattcgttttgctcatctttggaattttggttgggaattttagtttagcactcatcatttttgattggattaataaataaaagaaatattttcctacttcttacaagaataatatacccctagttgcaagaatgaattattccggaagacaccctggatgaaaaataacattttaataaaaattattaacagaaaagcagaacaaaatggcagtgggtatggggaagtaagagtgtagcagttttaatcaaaaaaagaaacaaactcgaaatgctcttaaaaaaaaaaaaaaaaaaaaaaaaaagggggggccgcggaattatggggttcgttacccggggatataattccgggacggataccttaaggggggcttagagaaattcgatttaaggtttataaatacagtagacctttagggggggcgcggttcccatttcgcccttatgtgagatgtataagcgcgcacatgggccgccgtttaagagtcgtgctggaaacccgtggt

SEQ ID NO: 1913 - protein, 480 aa, Homo sapien
RDRRLERRAGVEARRWNWSQLESSMEASWGSFNAERGWYVSVQQPEEAEAEELSPLLSNELHRQRSPGVSFGLSVFNLMNAIMGSGILGLAYVMANTGVFGFSFLLLTVALLASYSVHLLLSMCIQTAVTSYEDLGLFAFGLPGKLVVAGTIIIQNIGAMSSYLLIIKTELPAAIAEFLTGDYSRYWYLDGQTLLIIICVGIVFPLALLPKIGFLGYTSSLSFFFMMFFALVVIIKKWSIPCPLTLNYVEKGFQISNVTDDCKPKLFHFSKESAYALPTMAFSFLCHTSILPIYCELQSPSKKRMQNVTNTAIALSFLIYFISALFGYLTFYDKVESELLKGYSKYLSHDVVVMTVKLCILFAVLLTVPLIHFPARKAVTMMFFSNFPFSWIRHFLITLALNIIIVLLAIYVPDIRNVFGVVGASTSTCLIFIFPGLFYLKLSREDFLSWKKLGAFVLLIFGILVGNFSLALIIFDWINK

SEQ ID NO: 1914 - DNA, 1973 bp, Homo sapien
agcctgcgggaatccagcgcttattcgctgaccctcgagtcgcttcgctagctgtgcgccctcctgggcactagcctggagaggagcgtgcagacgcggctccttggagggagtgcggtcctctagggaggcatcgggctcctaggggcttcttggcgtgtgtggtgggattggggtccgccggccatggccttcactttcgctgcgttctgctacatgctgtctctggtgctgtgcgctgcgctcatcttcttcgccatctggcacataattgcctttgatgagttaaggacagattttaagagccccatagaccagtgcaatcctgttcatgcgagggaacggttgaggaacatcgagcgcatctgcttccttctgcgaaagctggtgctgccagaatactccatccatagcctcttctgcattatgttcctgtgtgcgcaagagtggctcacgctggggctgaatgtccctctacttttctatcacttctggaggtatttccactgtccagcagatagctcagaactagcctacgacccaccggtggtcatgaatgccgacactttgagttactgtcagaaggaggcctggtgtaagctggccttctatctcctctccttcttctactacctttactgcatgatctacactttagtgagctcttaacgcaaagaccatgcacatcatcagagactgagatgggagaggcctgagacggagaggtgcatttctgctggtgactggaggagggaccagaatgaggatacgtgagaaatagacccggcaggcagtcagactgaatgggagctggaatcacgcagcagttgggagccgagttaaccctgcgtgtctgtgtcaccctgtttgtcaatctttggcattcgaattccacacacggggtcctagagcccttctgagcatcagtggtgtgggggagtaggtgacgaaacactagacctctcctgagagagaattgctgcttcctgaatccacttcattgaacagcaccttgcaagttcaaatgagttcctgggagcggaggctggaaggccacaaggtgcttgctaaggaacagaatgacccagagtcaaggccaagtctgcagggacctgttgaaagcctcgagaatgtcttggctgcccaagactcttgttgcctttcttccaagccatggccatgccctttttctcaaatgggaggggctggagggtgtgtgggatttgtcttcagctgcaaccagccttgagcctgctgggctattttcagcgaggaggggtgaatataggaaaaatgcatttttgaaacgtttgcaacatgatcaaggtgttagttctccaccacacaagttgtattcttcttttgccacctcaaaccatcacagagtctttaaatgcaaatcaattggtcaatgctagtcaaagctatgttcttacaaaaaccccagacagctcagagctcagaaaatcctgtggagtggctgctctgtaccgtgggcatccggcagccaggaagtgagacaacataattataactttgttttatgatgctgcatcatttgtactgtttaggtcgacgtgaggacatcatcttatttagaattttccgtttggcattctcttttgggtgggagttatgctgggggttgtaaataatgacaaggctgagatttttatgatgtttaaattgggcacaatgattttgaccttattccccaaacttcttttcttttctactgtttaacatacacaggctatttatacacgtccccagctcccatctgaaacctgtgactcaggtttatgaatggtgtttgtgtagcaacacattgtgtgctatgtttattaaaatgcagcgacaaaaaaaaaaaaaaaaaaaaaaaaaaaaaaaaaaaaaaaaaaaaaaaaaaaaaaaaaaaaaaaaaaaaaaaaaaaaaaaaaaaaaaaaaaaaaaaaaaaaaaaaaaaaaaaaaa

SEQ ID NO: 1915 - protein, 160 aa, Homo sapien
MAFTFAAFCYMLSLVLCAALIFFAIWHIIAFDELRTDFKSPIDQCNPVHARERLRNIERICFLLRKLVLPEYSIHSLFCIMFLCAQEWLTLGLNVPLLFYHFWRYFHCPADSSELAYDPPVVMNADTLSYCQKEAWCKLAFYLLSFFYYLYCMIYTLVSS

SEQ ID NO: 1916 - DNA, 1740 bp, Homo sapien
gaattccgggctgcagtcacagaatggaaatctgcagaggcctccgcagtcacctaatcactctcctcctcttcctgttccattcagagacgatctgccgaccctctgggagaaaatccagcaagatgcaagccttcagaatctgggatgttaaccagaagaccttctatctgaggaacaaccaactagttgctggatacttgcaaggaccaaatgtcaatttagaagaaaagatagatgtggtacccattgagcctcatgctctgttcttgggaatccatggagggaagatgtgcctgtcctgtgtcaagtctggtgatgagaccagactccagctggaggcagttaacatcactgacctgagcgagaacagaaagcaggacaagcgcttcgccttcatccgctcagacagtggccccaccaccagttttgagtctgccgcctgccccggttggttcctctgcacagcgatggaagctgaccagcccgtcagcctcaccaatatgcctgacgaaggcgtcatggtcaccaaattctacttccaggaggacgagtagtactgcccaggcctgcctgttcccattcttgcatggcaaggactgcagggactgccagtccccctgccccagggctcccggctatgggggcactgaggaccagccattgaggggtggaccctcagaaggcgtcacaacaacctggtcacaggactctgcctcctcttcaactgaccagcctccatgctgcctccagaatggtctttctaatgtgtgaatcagagcacagcagcccctgcacaaagcccttccatgtcgcctctgcattcaggatcaaaccccgaccacctgcccaacctgctctcctcttgccactgcctcttcctccctcattccaccttcccatgccctggatccatcaggccacttgatgacccccaaccaagtggctcccacaccctgttttacaaaaaagaaaagaccagtccatgagggaggtttttaagggtttgtggaaaatgaaaattaggatttcatgatttttttttttcagtccccgtgaaggagagcccttcatttggagattatgttctttcggggagaggctgaggacttaaaatattcctgcatttgtgaaatgatggtgaaagtaagtggtagcttttcccttctttttcttctttttttgtgatgtcccaacttgtaaaaattaaaagttatggtactatgttagccccataattttttttttccttttaaaacacttccataatctggactcctctgtccaggcactgctgcccagcctccaagctccatctccactccagattttttacagctgcctgcagtactttacctcctatcagaagtttctcagctcccaaggctctgagcaaatgtggctcctgggggttctttcttcctctgctgaaggaataaattgctccttgacattgtagagcttctggcacttggagacttgtatgaaagatggctgtgcctctgcctgtctcccccaccaggctgggagctctgcagagcaggaaacatgactcgtatatgtctcaggtccctgcagggccaagcacctagcctcgctcttggcaggtactcagcgaatgaatgctgtatatgttgggtgcaaagttccctacttcctgtgacttcagctctgttttacaataaaatcttgaaaatgccaaaaaaaaaaaaaaaaaaaccggaatcccggccggaattc

SEQ ID NO: 1917 - protein, 177 aa, Homo sapien
MEICRGLRSHLITLLLFLFHSETICRPSGRKSSKMQAFRIWDVNQKTFYLRNNQLVAGYLQGPNVNLEEKIDVVPIEPHALFLGIHGGKMCLSCVKSGDETRLQLEAVNITDLSENRKQDKRFAFIRSDSGPTTSFESAACPGWFLCTAMEADQPVSLTNMPDEGVMVTKFYFQEDE

SEQ ID NO: 1918 - DNA, 707 bp, Homo sapien
  Unsure 647: Unknown base
ctcagtgcagggacgtcacccctgccaggcaagcccagggcacagatgccaggatggcttctccctctcagtgcgaggcttcacccctgccaggcaagcccagggcatagatgctgagacagcctctccctctcagtgcagggacgtcacccctgccaggcaagcccagggcacagaggccgggacggcctctccctctcagtgtgaggcttcacccatgctaggcaagcccagggcacagatgccgggatggcccctccctctcagtgcgggaacgtcacccctgccaggcaagcccagggcacagatgctgcgatggcctcttcctcttaagtgtggggcctcacccctgcttttctttctttttttgtattgtcaaaattgtatttccatattgaagcagcttgagtttctactgaaaatgagcccgaattatttcactattactgtaaagggttcatcttactctggcattctgagaattagactgaaagtttaatttctgcagttccctcatattcagattctttctttgatgttataacacaaagtcattcctactcaaatgtaataaaattgaggctccacggaggcccgtgtccacatcagctgcagctcccactcagacagacggcctgccccacagnctgccctttgctgaagataccctcgctttatacttgcatttcgcttttcagtaaaaacag

SEQ ID NO: 1919 - DNA, 2511 bp, Homo sapien
gcagaaggcacgaggaagccacagtgctccggatcctccaatcttcgctcctccaatctccgctcctccacccagttcaggaacccgcgaccgctcgcagcgctctcttgaccactatgagcctcctgtccagccgcgcggcccgtgtccccggtccttcgagctccttgtgcgcgctgttggtgctgctgctgctgctgacgtaccagggcccatcgccagcgctggtcctgccgctgctgtgttgagagagctgcgttgcgtttgtttacagaccacgcagggagttcatcccaaaatgatcagtaatctgcaagtgttcgccataggcccacagtgctccaaggtggaagtggtagcctccctgaagaacgggaaggaaatttgtcttgatccagaagccccttttctaaagaaagtcatccagaaaattttggacggtggaaacaaggaaaactgattaagagaaatgagcacgcatggaaaagtttcccagtcttcagcagagaagttttctggaggtctctgaacccagggaagacaagaaggaaagattttgttgttgtttgtttatttgtttttccagtagttagctttcttcctggattcctcactttgaagagtgtgaggaaaacctatgtttgccgcttaagctttcagctcagctaatgaagtgtttagcatagtacctctgctatttgctgttattttatctgctatgctattgaagttttggcaattgactatagtgtgagccaggaatcactggctgttaatctttcaaagtgtcttgaattgtaggtgactattatatttccaagaaatattccttaagatattaactgagaaggctgtggatttaatgtggaaatgatgtttcataagaattctgttgatggaaatacactgttatcttcacttttataagaaataggaaatattttaatgtttcttggggaatatgttagagaatttccttactcttgattgtgggatactatttaattatttcactttagaaagctgagtgtttcacaccttatctatgtagaatatatttccttattcagaatttctaaaagtttaagttctatgagggctaatatcttatcttcctataattttagacattctttatctttttagtatggcaaactgccatcatttacttttaaactttgattttatatgctatttattaagtattttattaggagtaccataattctggtagctaaatatatattttagatagatgaagaagctagaaaacaggcaaattcctgactgctagtttatatagaaatgtattcttttagtttttaaagtaaaggcaaacttaacaatgacttgtactctgaaagttttggaaacgtattcaaacaatttgaatataaatttatcatttagttataaaaatatatagcgacatcctcgaggccctagcatttctccttggataggggaccagagagagcttggaatgttaaaaacaaaacaaaacaaaaaaaaacaaggagaagttgtccaagggatgtcaattttttatccctctgtatgggttagattttccaaaatcataatttgaagaaggccagcatttatggtagaatatataattatatataaggtggccacgctggggcaagttccctccccactcacagctttggcccctttcacagagtagaacctgggttagaggattgcagaagacgagcggcagcggggagggcagggaagatgcctgtcgggtttttagcacagttcatttcactgggattttgaagcatttctgtctgaatgtaaagcctgttctagtcctggtgggacacactggggttgggggtgggggaagatgcggtaatgaaaccggttagtcagtgttgtcttaatatccttgataatgctgtaaagtttatttttacaaatatttctgtttaagctatttcacctttgtttggaaatccttcccttttaaagagaaaatgtgacacttgtgaaaaggcttgtaggaaagctcctccctttttttctttaaacctttaaatgacaaacctaggtaattaatggttgtgaatttctatttttgctttgtttttaatgaacatttgtctttcagaataggattctgtgataatatttaaatggcaaaaacaaaacataattttgtgcaattaacaaagctactgcaagaaaaataaaacatttcttggtaaaaacgtatgtatttatatattatatatttatatataatatatattatatatttagcattgctgagctttttagatgcctattgtgtatcttttaaaggttttgaccattttgttatgagtaattacatatatattacattcactatattaaaattgtacttttttactatgtgtctcattggttcatagtcttttaatgtttattcaaaggacaaaataaagactatgaaccaatgagacacatagtctttattttgtcctttgaataaacattaaaagatttctaaacttc

SEQ ID NO: 1920 - protein, 152 aa, Homo sapien [sequence omitted]

SEQ ID NO: 1921 - DNA, 2792 bp, Homo sapien
ccggcggcggcggcggcggcgggctgcgagggcggcgggggcccgaacccggggccggcgggcggcaggaggcctcctcgggccgcggggggcgccaccgccggctcccggcagcccagcgtggagaccctggacagtcccacaggatcacatgttgaatggtgtaaacagcttatagctgctacaatttctagtcagatttcaggttcagtgacatcagaaaatgtgtccagagattacaaggctctaagggatggaaataagctggcacagatggaagaggctccacttttcccaggagaatcaattaaagccattgtgaaagatgtcatgtatatctgcccatttatgggagcagtgagtggaaccctgacagtgacggactttaagctgtacttcaaaaatgtcgagagggacccgcattttatccttgatgttccccttggagtgatcagcagagtggagaagattggagcacagagccatggagacaattcctgtggtatagagatagtgtgcaaggatatgaggaacttgcggcttgcttataaacaggaagaacagagtaaactagggatatttgaaaacctcaacaaacatgcatttcctctttctaacggacaggcactatttgcattcagctataaagaaaaatttccaattaatggctggaaagtttatgatccagtatctgaatataagagacagggcttgccaaatgagagttggaaaatatccaaaataaacagtaattatgagttctgtgacacctaccctgccatcattgttgtgccaactagtgtaaaagatgatgacctttcaaaagtggcagcttttcgagcaaaaggcagagtccctgtgttgtcatggattcatccggaaagtcaagcaacgattacccgttgcagccagccacttgtgggtcccaatgataagcgctgcaaagaggatgaaaaatacttgcaaacaataatggatgctaacgcacagtcacacaagcttatcatctttgatgctcgacaaaacagtgtcgctgataccaacaagacaaagggtggaggatatgaaagtgaaagtgcttacccaaatgcagaacttgtgttcttggagatccacaacattcatgtcatgcgagagtcactacgcaaattaaaagagattgtgtacccttcgatcgatgaggcgcggtggctctccaatgtggatgggacgcattggctggaatatataaggatgctgcttgctggggcagtaagaattgctgataaaatagaatctgggaaaacatctgtggtggtgcattgcagcgacggttgggaccgaacagcccagctcacatctctggctatgctaatgttggacagttactacaggaccattaaaggatttgaaactctcgtagaaaaggagtggataagctttggacacaggtttgcactgcgagtgggccatggtaatgacaaccatgcggatgctgaccgatctcccatatttctgcagtttgttgattgtgtttggcaaatgacaaggcagtttccttcagcattcgagtttaatgagctattcttgattacaattttggatcacctttatagctgtctttttgggacctttttgtgcaactgtgaacagcagcgattcaaagaggcatggggggctgggacccagcgagcccgtggctctctcaggagtagatgagtgctagaccctggacctcctgactccgagttcatgtagtctccgctgcaccaactccaaaaccgtgggattctgcttttcatcctctgtggtgttggccagatcatacttgaaggccttggaaatggagtctgctgattagccaaaaagcccactttaggatgtatatacaaagacgatatctttatggtcgtatatcaatagccagctagacgagttttctaatcccttctttgtgaattatgaaaaccacgtgttatatcctgttgctagtctgagtcatttggaattgtgggtaaattattatgtacgatggaatccacggatgagacctcagatgcccattcaccagaatctcaaggagctgctggccgtcagggcggagctgcagaagcgtgtggagggtctacagcgggaggtggccacgcgcgccgtctcatcctcatctgagcggggctcctcgccctcccactccgccacctccgtccacacctcggtctgatgggcgagaaatatgtaatcccctggctgactaggactgttaaacatagtgtggactggatgatgccttcgacaaaccagagaagccaagttggggggagctggtgcctggagtgggccctgtgcacctcacctggcggaggctggggggggctctgtcagcaggaccctagaggagactctcattcgattttaaagaagcacaacgggtcattttcctttgtatgttcctagcgcagaactgtttctaaaacaacttgaagtatagttttgttatctaagcaatttttgttttaagtaagtaagtgtactagaatgcgaagccgttatggttcaggtttttaaaaactggtacagtattgtatttgtctcatctgttgcactgtatttcaatcatctgtaattaaaatgatcatatgtttgctccctggtcttttttaagtaagtaagtaagtatcttagtagatttttcctttgaggaaaatcggtaataaaataacatggattgaatgtttactgtgcgtcaagcacagttaatatatgatgatgtaaagtaactaactttatgtgatttaattcattcagtaaattgt

SEQ ID NO: 1922 - DNA, 1984 bp, Homo sapien
gggactcgtggctgtggtggcttcggcagcggcttcagcagatcggcggcatcagcggtagcaccagcactagcagcatgttgagccgggcagtgtgcggcaccagcaggcagctggctccggttttggggtatctgggctccaggcagaagcacagcctccccgacctgccctacgactacggcgccctggaacctcacatcaacgcgcagatcatgcagctgcaccacagcaagcaccacgcggcctacgtgaacaacctgaacgtcaccgaggagaagtaccaggaggcgttggccaagggtaggttccaggctgagcggcgggaggcagtccccggcagaggcgaccccagggagccaggccccatacggacgggcctctccgtggaggagaactcgcttcgcatttgtaccggttccgagttttccaggcacgatagtctctcttttaaacacatggtctacctcattgtagaaggagtgcctcgatgggtttgaacacacttctgtcatctcagggaacttggggtcctgcgaaggagcttgccttactgttgtgagccacattccgttacacatattgccagcactggtgaattgtagggcctgaaaagaaagctctactgtgtcactcgttttttttgcaaattgaaattgttcttgttgtataatgtgctttggggaaatgtttggtctctcaggtaggtgtgccagccgtttgcaggagggctgagagcgcctgtccactggtggccagacatcatcgggtccgcaggtgtctctgagtgtcagggtcacctcctgatagaagtgggagtggtgtcttactgccaggtcacactgaaggtgggagacaggaggacactactccgtgctaggaaccatggtccttgtcatcttcctgagagcaaacggggtcgggactccagcctaggacttggagactccctgcatccccagctaccctgcaggtgaaacttcactgagcccacttgacttcaggtgggagaggaggaggcacaccgttgtggtgtgcgttaccaaaaaagcagtaacctaactgtggaacagttcaggatctttagacttgatacttttcttgatttcccttaggggtcaaagttcacaaggaaaatagccctttagtgggaaactgaaacaggcttgtttttatttactatttactcatatttgtaatgcaattaaaatatatgttgttaacttttttttttttctcaagagctcggttgataaaaccaggggtatgtggactttttgagtctgtgccttttgggggtgtgtatgggaatgttatgttttaacgttttttacaaaatagaattgtctttttagtctattcgttagtggtttgcacaaggaagataatcgatagtcatgttttttagactctctgtattgcttggtaagctacgtagtaaaaaatgtttacttttccttaaatgttttgaatttcggggttatgaaatttgttgagtaatttttagacagtcacatcttgttgactggaggcatctagtggaaaaatgcagtatttcagcctgattgtgtttgaagtaaatgattaaaagaggaggaagttaccacattctggaagatttacttgagacagacgaaccttgaattacgggaaaaggccccgtgatttaggaaataacaaatttgggaaacatgtaatggggagagactggggaataccccagttgtgaaagtacttcctgtaaggcaacatctgacaccaggaacctttctcttcagtattttaaaaacaacttaatttcagtcctttacttgtggaatcagagccttacttatgtaatacaacccactggaaaaaagctttttattgtattgtactatattgtttataagtgattgagtacctgcagagctttcttttacttaaacatattttaaaaattattaaaaagattttcatgtttgaaaaaaaaaaaaaaaaaaaa

SEQ ID NO: 1923 - DNA, 1436 bp, Homo sapien
tccagagaagcttcgcgagtggctagagacggctgggccctggggccaggctgcgtggcaggactgccagggtgtgcagggggctgctggccaagctgctgtctcagctgcagcgcttcgatcgcacccaccggtgccccttcccccatgtggtgcgagctggcgccatcttcgtgcccattcacctggtgaaggagcggctcttccctcggctgccacccgcttctgtggaccatgtgctgcaggagcatcgtgtggagctgcggcccaccacgctgtcggaggagcgggcactgcgggagctcgccctgccaggctgcacctcacgcatgctgaagttactggcgctgcgccagctgccggacatttaccccgaccttctcggcctgcagtggcgcgactgtgtacgccgccagctgggtgagcatggggcagccccagtggccaccggagctgtgtgagcaagtgacaggtgtgtgtgctgtgtgagtgcgtcacagctggggctgagtgattccaaggactcctgcccgggtagggggctttaggatgagctctaggtacccccaccccttgaccctccagacaatcagtgagcaccttcatagcctcttttgtaggcttctgaacatgccagctgctctgtccccatggaaactcctcggcctcccctggtgctgcaccttcttggattccctcctcctctgcctgtgccttctccatctttggtgcagtgtttccggcactctggttaggccctgttttctagctgagataatttccctgatctccagcctagcatcccctttgtgagctctagccctaaataacccactgcatgctgggcctcagcccctgggtctctctcccacactgaactcatcccaaatcacactcccgagccttcccctcagctcacttcccacaaccagttcttttccatgtcagtgaagggcaccccctttcacaaagctcctcatgctctagacctggtgagggccacagctgcctttttgaacgtgtagttttgcagtcctccccggcccttgcatacacagaagtgtgcgcataagtcgcattgttttgtggtttgcttttcctctactaaatgatgtgcctgctgttctccagcttgttttcttttaatgtcctggaggaccacacaactgccgaagtgttgtgtggcgtgtatgatcacacttcttcagctagggatctggtgatgggaccaagtggattctgttattgcccctcctgcagtcagtacacctggcattgcagcctgaggccccctctagatttatctctccctgctgaccccaattccaccctctcccatttccactgaccagactcttcccatgtagaaactgttcctagttccatcaccgtagtggcagccttgacccgggaccttacctggttgggatggggaa

SEQ ID NO: 1924 - protein, 140 aa, Homo sapien
PEKLREWLETAGPWGQAAWQDCQGVQGAAGQAAVSAAALRSHPPVPLPPCGASWRHLRAHSPGEGAALPSAATRFCGPCAAGASCGAAAHHAVGGAGTAGARPARLHLTHAEVTGAAPAAGHLPRPSRPAVARLCTPPAG

SEQ ID NO: 1925 - DNA, 1381 bp, Homo sapien
atgcgcgatctcccggagcatgcgcagcagcggcgccgacgcggggcggtgcctggtgaccgcgcgcgctcccggaagtgtgccggcgtcgcgcgaaggttcagcagggagccgtgggccgggcgcgcggttcccggcacgtgtctcggcacgtggcagcgcgcctggccctgggcttggaggcgccggcgccctggatccgccggccgtggtcgccgagtcggtgtcgtccttgaccatcgccgacgcgttcattgcagccggcgagagctcagctccgaccccgccgcgccccgcgcttcccaggaggttcatctgctccttccctgactgcagcgccaattacagcaaagcctggaagcttgacgcgcacctgtgcaagcacacgggggagagaccatttgtttgtgactatgaagggtgtggcaaggccttcatcagggactaccatctgagccgccacattctgactcacacaggagaaaagccgtttgtttgtgcagccaatggctgtgatcaaaaattcaacacaaaatcaaacttgaagaaacattttgaacgcaaacatgaaaatcaacaaaaacaatatatatgcagttttgaagactgtaagaagacctttaagaaacatcagcagctgaaaatccatcagtgccagaataccaatgaacctctattcaagtgtacccaggaaggatgtgggaaacactttgcatcacccagcaagctgaaacgacatgccaaggcccacgagggctatgtatgtcaaaaaggatgttcctttgtggcaaaaacatggacggaacttctgaaacatgtgagagaaacccataaagaggaaatactatgtgaagtatgccggaaaacatttaaacgcaaagattaccttaagcaacacatgaaaactcatgccccagaaagggatgtatgtcgctgtccaagagaaggctgtggaagaacctatacaactgtgtttaatctccaaagccatatcctctccttccatgaggaaagccgcccttttgtgtgtgaacatgctggctgtggcaaaacatttgcaatgaaacaaagtctcactaggcatgctgttgtacatgatcctgacaagaagaaaatgaagctcaaagtcaaaaaatctcgtgaaaaacgggagtttggcctctcatctcagtggatatatcctcccaaaaggaaacaagggcaaggcttatctttgtgtcaaaacggagagtcacccaactgtgtggaagacaagatgctctcgacagttgcagtacttacccttggctaagaactgcactgctttgtttaaaggactgcagaccaaggagtcgagctttctctcagagcatgcttttctttattaaaattactgatgcag

SEQ ID NO: 1926 - protein, 423 aa, Homo sapien
MRSSGADAGRCLVTARAPGSVPASREGSAGSRGPGARFPARVSARGSAPGPGLGGAGALDPPAVVAESVSSLTIADAFIAAGESSAPTPPRPALPRRFICSFPDCSANYSKAWKLDAHLCKHTGERPFVCDYEGCGKAFIRDYHLSRHILTHTGEKPFVCAANGCDQKFNTKSNLKKHFERKHENQQKQYICSFEDCKKTFKKHQQLKIHQCQNTNEPLFKCTQEGCGKHFASPSKLKRHAKAHEGYVCQKGCSFVAKTWTELLKHVRETHKEEILCEVCRKTFKRKDYLKQHMKTHAPERDVCRCPREGCGRTYTTVFNLQSHILSFHEESRPFVCEHAGCGKTFAMKQSLTRHAVVHDPDKKKMKLKVKKSREKREFGLSSQWIYPPKRKQGQGLSLCQNGESPNCVEDKMLSTVAVLTLG

SEQ ID NO: 1927 - DNA, 1502 bp, Homo sapien
gccacagtgctccggatcctccaatcttcgctcctccaatctccgctcctccacccagttcaggaacccgcgaccgctcgcagcgctctcttgaccactatgagcctcctgtccagccgcgcggcccgtgtccccggtccttcgagctccttgtgcgcgctgttggtgctgctgctgctgctgacgcagccagggcccatcgccagcgctggtcctgccgctgctgtgttgagagagctgcgttgcgtttgtttacagaccacgcaaggagttcatcccaaaatgatcagtaatctgcaagtgttcgccataggcccacagtgctccaaggtggaagtggtagcctccctgaagaacgggaaggaaatttgtcttgatccagaagccccttttctaaagaaagtcatccagaaaattttggacggtggaaacaaggaaaactgattaagagaaatgagcacgcatggaaaagtttcccagtcttcagcagagaagttttctggaggtctctgaacccagggaagacaagaaggaaagattttgttgttgtttgtttatttgtttttccagtagttagctttcttcctggattcctcactttgaagagtgtgaggaaaacctatgtttgccgcttaagctttcagctcagctaatgaagtgtttagcatagtacctctgctatttgctgttattttatctgctatgctattgaagttttggcaattgactatagtgtgagccaggaatcactggctgttaatctttcaaagtgtcttgaattgtaggtgactattatatttccaagaaatattccttaagatattaactgagaaggctgtggatttaatgtggaaatgatgtttcataagaattctgttgatggaaatacactgttatcttcacttttataagaaataggaaatattttaatgtttcttggggaatatgttagagaatttccttactcttgattgtgggatactatttaattatttcactttagaaagctgagtgtttcacaccttatctatgtagaatatatttccttattcagaatttctaaaagtttaagttctatgagggctaatatcttatcttcctataattttagacattctttatctttttagtatggcaaactgccatcatttacttttaaactttgattttatatgctatttattaagtattttattaggagtaccataattctggtagctaaatatatattttagatagatgaagaagctagaaaacaggcaaattcctgactgctagtttatatagaaatgtattcttttagtttttaaagtaaaggcaaacttaacaatgacttgtactctgaaagttttggaaacgtattcaaacaatttgaatataaatttatcatttagttataaaaatatatagcgacatcctcgaggccctagcatttctccttggataggggaccagagagagcttggaatgtcaaaaaaaaaaaaaaaaaaaaaaaaaaaaaa

SEQ ID NO: 1928 - protein, 114 aa, Homo sapien
MSLLSSRAARVPGPSSSLCALLVLLLLLTQPGPIASAGPAAAVLRELRCVCLQTTQGVHPKMISNLQVFAIGPQCSKVEVVASLKNGKEICLDPEAPFLKKVIQKILDGGNKEN

SEQ ID NO: 1929 - DNA, 1725 bp, Homo sapien
cgcctcttcacggcactgggatccgcatctgcctgggatcatcaagccctagaagctgggtttctttaaattagggctgccgttttctgtttctccctgggctgcggaaagccagaagattttatctagcttatacaaggctgctggtgttccctctttttttccacgagggtgtttttggctgcaattgcatgaaatcccaatggtgtagaccagtggcgatggatctaggagtttaccaactgagacatttttcaatttctttcttgtcatccttgctggggactgaaaacgcttctgtgagacttgataatagctcctctggtgcaagtgtggtagctattgacaacaaaatcgagcaagctatggatctagtgaaaagccatttgatgtatgcggtcagagaagaagtggaggtcctcaaagagcaaatcaaagaactaatagagaaaaattcccagctggagcaggagaacaatctgctgaagacactggccagtcctgagcagcttgcccagtttcaggcccagctgcagactggctccccccctgccaccacccagccacagggcaccacacagccccccgcccagccagcatcgcagggctcaggaccaaccgcatagctgcctatgcccccgcagaactggctgctgcgtgtgaactgaacagacggagaagatgtgctagggagaatctgcctccacagtcacccatttcattgctcgctgcgaaagagacgtgagactgacatatgccattatctcttttccagtattaaacactcatatgcttatggcttggagaaatttcttagttgggtgaattaaaggttaatccgagaattagcatggatataccgggacctcatgcagcttggcagatatctgagaaatggtttaattcatgctcaggagctgtgtgcctttccatcccttccggctccctacccctcacttccaagggttctctctcctgcttgcgcttagtgtcctacatggggttgtgaagcgatggagctcctcactggactcgcctctctcctctcctccccccaggaggaacttgaaaggagggtaaaaagactaaaatgagggggaacagagttcactgtacaaatttgacaactgtcaccaaaattcataaaaaacaatagtactgtgcctctttcttctcaaacaatggatgacacaaaactatgagagtgacaaaatggtgacaggtagctgggacctaggctatcttaccatgaaggttgttttgcttattgtatatttgtgtatgtagtgtaactattttgtacaatagaggactgtaactactatttaggttgtacagattgaaatttagttgtttcattggctgtctgaggaggtgtggacttttatatatagatctacataaaaactgctacatgacaaaaaccacacctaaaccccttttaagaatttggcacagttactcactttgtgtaatctgaaatctagctgctgaatacgctgaagtaaatccttgttcactgaagtctttcaattgagctggttgaatactttgaaaaatgctcagttctaactaatgaaatggatttcccagtaggggtttctgcatatcacctgtatagtagttatatgcatatgtttctgtgcatgttctctacacaattgtaaggtgtcactgtatttaactgttgcacttgtcaactttcaataaagcatataaatgttg

SEQ ID NO: 1930 - protein, 144 aa, Homo sapien
MKSQWCRPVAMDLGVYQLRHFSISFLSSLLGTENASVRLDNSSSGASVVAIDNKIEQAMDLVKSHLMYAVREEVEVLKEQIKELIEKNSQLEQENNLLKTLASPEQLAQFQAQLQTGSPPATTQPQGTTQPPAQPASQGSGPTA

SEQ ID NO: 1931 - DNA, 1340 bp, Homo sapien
gctcattacttaatctcaggctccccactcaaaatttttcctgtcaggtgtatgatttaaagggggaggcctcaaaatacttgcagcttgtgtcctgtctggctttagaacttctggtgtttggtgcattttaacttcagcgcttgcacttttttcctgtgcctgcctaatctgtctctaccctgggatgtcttgctcttctaaagagttcctggccatcccttgatttacaaatgtgatgttgatttgtcagccctgtattacagttactcctattcctgtatccaccccacgatgctgtccagtagatttttagcctttgggttagaaattgttttttgttcaccattaatatccatttgagggctgggtagcactgtgattgtgattcagcaattgcatgggctttttcctcttctcagaacacttcctgggtctgattggtggcccagggagctgtcagagaagagcagagcaaatggccttcactttgtagatgagatggcaggagggtggattgttggtctcagtcagtggtgggacagaccagagctccgaacacttcagttttaaaactagttgtgagtttccaattctgttaatgtcttttttggtccttgtttctgctaaatgaatacatcccctccccttggaacttaatatcaataaataacaagcacagaaatatgcaaaaggaccaggtctacttgaagaatttgtgaggattaaatggtttatgagtagaggagggtcagtcagtaagtattggctacctcatgtgtgtcccattactaacttggttagacttatctattttttgtgtagtcttcctgtcataaaaattctgtgtaaggaccccatgctagtatcagtgaagattgtgaatccaggtgtgtctgactctacaatagttcttcacaagcattatatttcactgtgtagtgatacttcattttgaaagttgggaaaagcgtctttttcactttagtacagatgggtataaaagttacttaggacactagaaaacagttcattaaaagtaaaacaaagcctggtgcttgggccccaggaattcaaactgttttccagtgtaaatctgaatagcttggtctctgctcattgccaggactgggaggagttgggggtcccaggtcccatttctacatcccaattcagtgatactgggatcttaataacctacctgtgaggtgaagttggaaaaggcataggcaaggatagttgtcctgagagttttacacttgtgagaaaatactggcagctttgattttaagatgtgaatagatgatcgtggttcatgcctatactccctatactcccag

SEQ ID NO: 1932 - protein, 73 aa, Homo sapien [sequence omitted]

SEQ ID NO: 1933 - DNA, 4734 bp, Homo sapien
gagatatccttaccttactcaacagcaccaacaaggattggtggaaggtggaagtgaacgatcgtcagggttttgtgccggctgcgtacgtgaagaaattggaccccgcccagtcagcctcccgggagaatctcctggaggagcaaggcagcatagcactgcggcaggagcagattgacaatcaatatcattctctgctggaactgggtgagaagcgtaaaggcatgttggagaagagttgcaagaagtttatgttgttccgtgaagcgaatgaactacagcaatggatcaatgagaaggaagccgctctgacaagtgaggaggtgggagcagacttggagcaggttgaggtgctccagaagaagtttgatgacttccagaaggacctgaaggccaatgagtcacggttgaaggacattaacaaggtagctgaagacctggagtctgaaggtcttatggcagaggaggtgcaggctgtgcaacaacaggaagtgtatggcatgatgcccagggatgaaactgattccaagacagcctccccgtggaagtctgctcgtctgatggttcacaccgtggccacctttaattccatcaaggagctgaatgagcgctggcggtccctacagcagctggccgaggaacggagccagctcttgggcagcgcccatgaagtacagaggttccacagagatgctgatgaaaccaaagaatggattgaagagaagaatcaagctctaaacacagacaattatggacatgatctcgccagtgtccaggccctgcaacgcaagcatgagggcttcgagagggaccttgcggctctcggtgacaaggtaaactcccttggtgaaacagcagagcgcctgatccagtcccatcccgagtcagcagaagacctgcaggaaaagtgcacagagttaaaccaggcctggagcagcctggggaaacgtgcagatcagcgcaaggcaaagttgggtgactcccacgacctgcagcgcttccttagcgatttccgggacctcatgtcttggatcaatggaatacgggggttggtgtcctcagatgagctagccaaggatgtcaccggagctgaggcattgctggagcgacaccagggacaccggacagaaatcgatgccagggctggcactttccaggcatttgagcagtttggacagcagctgttggctcacggacactatgccagccctgagatcaagcagaaacttgatattcttgaccaggagcgtgcagacctggagaaggcctgggttcagcgcaggatgatgctggatcagtgccttgaactgcagctgttccatcgggactgtgagcaagctgagaactggatggctgcccgggaggccttcttgaataccgaagacaaaggagactcactggacagcgtagaggctctgatcaaaaaacatgaagactttgacaaagcgattaacgtccaggaagagaagattgctgctctgcaggcctttgccgaccagctcatcgctgccggccattatgccaagggagacatttctagccggcgcaatgaggtcttggacaggtggcgacgtctgaaagcccagatgattgagaaaaggtcaaagctaggagaatctcaaaccctccaacagttcagccgggatgtggatgagattgaggcttggatcagtgaaaaattgcaaacagcgagtgatgagtcgtacaaggatcccaccaacatccagagcaagcaccagaagcaccaggcttttgaagcagagctgcatgccaacgctgaccggatccgtggggttatcgacatgggcaactccctcattgaacgtggagcctgtgccggcagtgaggatgctgtcaaggcccgcctggctgccttagctgaccagtggcagttcttggtgcaaaagtcagcggaaaagagccagaaactgaaagaagccaacaagcagcagaacttcaacacagggatcaaggactttgacttctggctgtctgaggtggaggccctgctggcatccgaagattatggcaaagacctggcttctgtgaacaacctgctgaaaaagcatcaactgctggaagcagatatatctgcccatgaggatcgcctgaaggacctgaacagccaggcagacagcctgatgaccagcagtgccttcgacacctcccaagtaaaggacaagagggacaccatcaacgggcgcttccagaagatcaagagcatggcggcctcccggcgagccaagctgaatgaatcccatcgcctgcaccagttcttccgggacatggatgacgaggagtcctggatcaaggagaagaagctgctggtgggctcagaggactacggccgggacctaactggcgtgcagaacctgaggaagaagcacaagcggctggaagcagaactggctgcgcatgagccggctattcagggtgtcctggacactggcaagaagctgtccgatgacaacaccatcgggaaagaggagatccagcagcggctggcgcagtttgtggagcactggaaagagctgaagcagctggcagctgcccggggtcagcggctggaagagtccttggaatatcagcagtttgtagccaatgtggaagaggaagaagcctggatcaatgagaaaatgaccctggtggccagcgaagattatggcgacactcttgccgccatccagggcttactgaagaaacatgaagcttttgagacagacttcaccgtccacaaggatcgcgtgaatgatgtctgcaccaatggacaagacctcattaagaagaacaatcaccatgaggagaacatctcttcaaagatgaagggcctgaacgggaaagtgtcagacctggagaaagctgcagcccagagaaaggcgaagctggatgagaactcggccttccttcagttcaactggaaggcggacgtggtggagtcctggatcggtgaaaaggagaacagcttgaagacagatgattatggccgagacctgtcttctgtgcagacgctcctcaccaaacaggaaacttttgacgctgggctgcaggccttccagcaggaaggcattgccaacatcactgccctcaaagatcagcttctcgccgccaaacacgttcagtccaaggccatcgaggcccggcacgcctccctcatgaagaggtggagccagcttctggccaactcagccgcccgcaagaagaagcttctggaggctcagagtcacttccgcaaggtggaggacctcttcctgaccttcgccaaaaaggcttctgccttcaacagctggtttgaaaatgcagaggaggacttaacagaccccgtgcgctgcaactccttggaagaaatcaaagctttgcgcgaggcccacgacgccttccgctcctccctcagctctgcccaggctgacttcaaccagctggccgagctggaccgccagatcaagagcttccgcgtagcctccaacccctacacctggtttaccatggaggccctggaggagacctggaggaacctacagaaaatcatcaaggagagggagctggagctgcagaaggagcagcggcggcaggaggagaacgacaagctgcgccaggagtttgcccagcacgccaacgccttccaccagtggatccaagagaccaggacatacctcctcgatgggtcctgtatggtggaagagtcggggaccctcgaatcccagcttgaagctaccaaacgcaagcaccaggaaatccgagccatgagaagtcagctcaaaaagatcgaggacctgggggccgccatggaggaggccctcatcctggacaacaagtacacggagcacagcaccgtgggcctcgcccagcagtgggaccagctggaccagctgggcatgcgcatgcagcacaacctggagcagcagatccaggccaggaacacaacaggtgtgactgaggaggccctcaaagaattcagcatgatgtttaaacactttgactaggacaagtctggcaggctgaaccatcaggagttcaaatcttgcctgcgctccctgggctatgacctgcccatggtggaggaaggggaacctgaccctgagttcgaggcaatcctggacacggtggatccgaacagagatggccatgtctccttgcaagaatacatggctttcatgatcagccgcgaaactgagaacgtcaagtccagcgaggagattgagagcgccttccgggccctctgctcagagggaaagccttacgtgaccaaggaggagctctaccagaacctgacccgggaacaagccgactactgcgtctcccacatgaagccctacgtggacggcaagggccgcgagctccccaccgcgttcgactacgtggagttcacccgctcgcttttcgtgaactgagccactccctgggtcacccacccctcgctgcttgccctgcgtcgccttgctgcatgtccgctcctctgtgtgctctcactttccactgtaaccttaagcctgcttagcttggaataagacttaggagaatatggtgcttcactaacccgcttccggtccagtcacaatcatcatgtcactgtggggacccagatctgtgtcttgaagcagctgccctcattccgacttcagaaaatcgaagcagctggctcctccccttgttctctctcccaccctcccccaaatctgttttcatgtaaaagacaaataaatgatgacttcccccaaaaaaaaaaaaaaaaaaaac

SEQ ID NO: 1934 - DNA, 6834 bp, Homo sapien
  Unsure 4613-4614: Unknown base
ctcacacatagacacgcacacacaccctttctcgcacacacacacacacacacacacactctcacacattctcacatgctagacccttctaagcagcttgtccgtttttacacatgtatctgaactctcctgcatcactcttggccattttctcgcattcgattgcttttgccgttttttatttagatcagtacttgatttcattttcattttccagtctactttggggttctcgcagtggataatttagccaaaatgtttttcttgtggagacattagctgacaattcccaccacagactggcttgtacgtcctcccagggagacctaaacctggctcccctcccaccgcagttcttaatattgtggataagagatccatctttctcattctggatacctacttagtgctcatggaagaaggggtgccctgcccagccccagctgctaagctcacacctcctgtcaaaaagtcccaggacatgcacgacgagaggagcaagctggtgaatgagtatgcgtgtcgagtgctggaacttctggggatggggcatcgtctgtttgtgcctcggcttctggcgacctcaaaggaagaccttctgcaggctgattttgaaggtgctttaaagttctttagagttcagcttccaaagagatacagggcagaggaaaatgcaagaagactgatggagcaggcttgcaatattaaagtaccaaccaagaagctgaagaaatatgagaaagaatatcagacaatgcgagagagtcagctgcaacaggaagacccaatggatagatacaagagggagaaccgaagattacaggaggccagcatgaggttggaacaagagaatgatgaccttgcccatgaactagtaacaagcaaaattgctctacggaatgacttggatcaggcagaagacaaggcagatgtgttgaataaagagctccttttgaccaaacagaggctggtggagactgaagaggagaagaggaagcaagaggaagagactgcccagctaaaagaagtcttcaggaaacagctagagaaggcagaatatgaaataaagaagactacagctatcattgctgagtataaacagatctgttcgcagttgagtaccaggctggagaaacagcaagcagccagcaaggaggagctggaagtggtaaagggtaagatgatggcatgcaaacactgcagtgacattttcagcaaggagggtgctttgaaactagcagccacaggcagagaggaccagggaattgaaacagatgatgagaaggactcacttaagaagcagctgagagagatggaactggaactggcacaaaccaaactgcagttggtggaggccaagtgtaaaattcaggaacttgaacatcagagaggagcccttatgaatgaaatccaagctgcgaaaaactcttggtttagcaaaaccctgaactctatcaaaacggccacgggcacccagccattgcagccagcaccggtcacccagccacccaaggagagcacatagttccagccttacccaagcacaagagcacaatgttcaaaccaatggaaatctgggaggattcttcctggtgtccctttgaaggaaagtcaaggaggccagaaaacaagccagaatttttcagtagctctcactctttcttgtatgacacttttcaaagggatgctatttaaactgacctgttctatgttgaatacctattttccagcttctggaaggccatgttcagatccatcatagtattacacattattttgtttgcctgatgtttagttggaaataagtaattcagaactaaatgcttttttatttagaattattcataattatttttatcttacataaaaatggagacatctgttattccaaggttgaagtgataagaagatctttgtcacaggaaaaaaaaaaattgaaacctaaacatcttaagttttcaggatttattcagataaagcacactgtggggccaggcatgaccactctcaggtttcctcctgagcctgattcccagggaagtgttaatcctgtccaaaggaaagaaccaatcagcgatcattggtttactttcattttctgttcggtacatctggaaatgaagtgccaggaatagacgggctgttcagattatacgctaggtaaaaggaactgaaattttaataagtgtaggtcaggatcatttgggctgtggtattctaacagatccttttaagaatgccacataggacttgtgagttcctaagtacaccaaagtatggacacagatgtgacttctggcaattataaagttaaaggtggatattgcaccttacagacttagggagcctttaccagagacgcctaaaaagccccaggttcagccattgtgctgaatagagtggaatatagaaccagggacagagtatttcatttaacgttgatatatacttgctaaggaaacactaacaatactgtaactttgttaaaggacatagtattgaaatgggaaatagaggtcaggctcacatcatcttagtttaatgctgggcaacttttttctgatttctgtagttccctgaaaatgtgtccttcgtacccataaagagatacaaatgcatttgtaacatttttgattgaatataaaacctttacagaaatacttatctcatggaaaggtaaagctattgtttaaaaattagtggaaatattttttcaattatatttaacatgcctataaaaatagtccttgcaggaaattatttgataagagcaaaactatttttattttataaactattttggaggcctctgatcctttcaaaccaaccaaactactattagatatgtacaataacatttgttgatattaatcattggcctcattgttgaacatattatttgcaaagaatcttaaactctgtagtgccagaatgattctcatctgtgccatattttgcaattaaaagtaacacacccttagaagaatcaaataagagccatctacatcccaggaggatgcaccaagttgctcacagtggatcttttcctctaaaatgatcttttatgttctaaaaagtgaaatcccctttatctgtgtttatattctctacagcccataaaactgatgtgattgttatgttatactcatcagataatacttttcttacataaatctttcattgttgttctgacatctttcattacaaaatttattttcttaacaaaaaggaacataacccagcattccaagtgtctgtgttggctttaacattctctacatggtggtctagataagctaattttttttttttttttttttgtaaaatgtaatagctagaaaatgttatcttcgcgcttgtttttgtaaatcatttagtataggctgttagctttactggtactttacgctttgattccaagaagccttgtgcagttgccttatcaaatggccagctaaattaaagatgctcttttgtgttgtgaatttcatagttctgtacagagcttgtttcaatttacaaaaataagtacattccacagaatgcctaaattgtgtaattttctttaaataatagtaggtgagggagaaacataatggctctaggtcaatcccttatctaaagaccttgttcaacttcatagtccctttccttttaaagaggagaagagaaaaatcccccctggccaggcatggtggctcacatctgtaatcccagcactttgggaggctgaggtgggtggatcacctaaggtcaggagtttgagaccagcctggccaacatggtgaaaccctatctctactgcaaaatacaaaaattagccgggcttggtggcgggtgcctgtaatcccagctactcgggaggttgaggcaggagaatcacttgaacccaggaggcagaggttgcagtgggccaagattacggcattacattccatccagcctgggcgacaagagcaaaattccgtctcgaaaaatcaccaggtacatacctctcaagtttgataagtccatcttttgagttttcttttagctctttcaaaagattacgagggcaatacatattttttttttttttattctccagccccatatcatacttgggtatgcctgttggtaccataagcctaaactctccttcactgcaatgcctttgagtcagtagcaatagtaaagactagaaacaaagaaaattcagaatttggtatgtgatatgattgttcatacaatatgttataatagcaatattccaaacaatatgtccttcactgtctattgttggaaaactcatgcatcccagcatgaagtaactcctagttttaattttagttattttgagatatatttgagaattgcatctcttctcttgaatttcacttagaagagattaaccagccaaatatccaggaaagtttcaaaacattctagtgtttttcatcctttgctaggatgcactctgtacaaaacattcctctgaaaatctaatatttgcagtatctaagaattgatcatttctattttcattaaattctgtggaaaaaattaaatgaatgaaattcaacttcataattcagttcatcagcttttgtatcttgagaatctaaacacgtctnnaaatctgaaagaaaccaagctggattttgcagtgcatatgtttgctagcttcccacatcctgaaccatgtcaaaatttggttttatttagttacatataatttaatgcaaagaaattctgttacttaatgttctgtttatttatgagtgcctatcaggaacactaataggaatgccattcaaccagtgtcttctgcccctctcccagctgttaaattagtacttcttcattggctttctgaaatgtcctgagtaaagtagaaaagcaacctttgtatggatgtggggatatttaatagtatgtatcttgtttcatttttttcctatgatgtattaatatttatttttctccaacccctgctccattttcttaaaatattttccagttaataactagttgctttatttcctagctgaagtgagaaaaccaacggaaaacaatacagatttgggcagaggagatagagttacatctttaaaggagtgagccagtcacccaggagaatcacatgtgtaactgatgtaggggtttaagtcttcatactttcactaaaatctgtctactaactctcccaccaacctttgcatcaaacacttaggtacctgcctgattaggggggcccctttaagggaaaaaacttttaaaaaattaaatgccttggttttgttttatcttctgggaaagaacacttttacttgattagcaagatgattatattatataacttgcccttaaaaacactccaaaatactgactccttttctccaattacaaatgagtgtgaagaaattctgttgtatgatttgaacactattaggtttgtatgtgtgtttaattggaagaattttatatagagtatctctgctgcttttgtttacctgggtaccacacaaccaaatacacattgagatttcaagaaatgatgatgaaagccagaaggccagaccacagctctgcagcctgtttcctacaaccagatataaaactctttctcgtcgccatgctgatagtcacactgaactagaactgtcccaacacattcttcctctctcataatggcttccatttaatacaggcaaagccctttaccttagcaaattctttatctttcaaaagtgaccaaaatgaggacttcaaccttggctgcacctcaataggagatgctgatcttgagttgtaatgagaaaagtgggcatataggagattttagtgactgcagtcagctgtctggcattcctttctcagtttgcatctaaaagactacatatgtcaagcttatctccacctgaatttgctgcctgctataaaaacatttcattaatatatcccattcttcctacctccatctctggtttgtcattagtggtattctgaaaagcttaagaaaaaagaatcattgagtagaaagtgaacattttaagttattttcctttttcattggcaattagttaacatgtaaaatcttttccattaaactgtataacttttaataactatatattatatatgggataaaatatatggactgaattgtgagaatataaatgcatcgaaagactctggtgtcatgaaagcacaagaataaggctggagatggtcccagatccaagatgtcccaaaagccttttgtatcagtttctctatttttggtattttgcataatgcatggatccttagttcaaatgagggacaaagtttctcagtcagccccacttcctttctttctaactcctacctttcccttgcagaggaggtagtagagattctggaattgtctatttttatgaattccattattttgtccatggcatctctaatgaaaacaggttctagaataaaggagttgattagtctgaacagtactaattaactacaaaataaacgttagtgatcagcctcttcctctataaacaatgaccaattagacgtttccgtaattccatgtattatgtatagtacactctataaatgtaaatgtaatgcttgtctaaaaagtgcaatttattgtacattgtcccaacaaatgtttacttttataatcgttatgaacttgaattggattagtatcttgtttttatgtgtgaatgaagccttgtgaaataaacaaatgcaactgagaaggtaacaaggtgactgtttttgtgagccagtgatgttttcaatgctttgtgttgcccctttggccccattaagcagtaataaacatttgttctgaagtcc

SEQ ID NO: 1935 - protein, 370 aa, Homo sapien
MEEGVPCPAPAAKLTPPVKKSQDMHDERSKLVNEYACRVLELLGMGHRLFVPRLLATSKEDLLQADFEGALKFFRVQLPKRYRAEENARRLMEQACNIKVPTKKLKKYEKEYQTMRESQLQQEDPMDRYKRENRRLQEASMRLEQENDDLAHELVTSKIALRNDLDQAEDKADVLNKELLLTKQRLVETEEEKRKQEEETAQLKEVFRKQLEKAEYEIKKTTAIIAEYKQICSQLSTRLEKQQAASKEELEVVKGKMMACKHCSDIFSKEGALKLAATGREDQGIETDDEKDSLKKQLREMELELAQTKLQLVEAKCKIQELEHQRGALMNEIQAAKNSWFSKTLNSIKTATGTQPLQPAPVTQPPKEST

SEQ ID NO: 1936 - DNA, 1195 bp, Homo sapien
ggcacgaggcgccagtcccctaaccctgaggctgccgcgcggcggtcactgcgccggggtagtgggccccagtgttgcgctctctggccgttccttacactttgcttcaggctccagtgcaggggcgtagtgggatatggccaactcgggctgcaaggacgtcacgggtccagatgaggagagttttctgtactttgcctacggcagcaacctgctgacagagaggatccacctccgaaacccctcggcggcgttcttctgtgtggcccgcctgcaggattttaagcttgactttggcaattcccaaggcaaaacaagtcaaacttggcatggagggatagccaccatttttcagagtcctggcgatgaagtgtggggagtagtatggaaaatgaacaaaagcaatttaaattctctggatgagcaagaaggggttaaaagtggaatgtatgttgtaatagaagttaaagttgcaactcaagaaggaaaagaaataacctgtcgaagttatctgatgacaaattacgaaagtgctcccccatccccacagtataaaaagattatttgcatgggtgcaaaagaaaatggtttgccgctggagtatcaagagaagttaaaagcaatagaaccaaatgactatacaggaaaggtctcagaagaaattgaagacatcatcaaaaagggggaaacacaaactctttagaacataacagaatatatctaagggtattctatgtgctaatataaaatatttttaacacttgagaacagggatctgggggatctccacgtttgatccgttttcagcagtgctctgaaggagtatcttacttgggtgattccttgtttttagactataaaaagaaactgggataggagttagacaatttaaaaggggtgtatgagggcctgaaatatgtgacaaatgaatgtgagtaccccttctgtgaacactgaaagctattctcttgaattgatcttaagtgtctccttgctctggtaaaagatagatttgtagctcacttgatgatggtgctggtgaattgctctgctctgtctgagatttttaaaaatcagcttaatgagagtaatctgcagacaattgataataacattttgaaaattggaaagatggtatactgtttttagaggaataaacgtatttgtggtttaaaaaaaaaaaaaaaaaaaaaaa

SEQ ID NO: 1937 - protein, 188 aa, Homo sapien
MANSGCKDVTGPDEESFLYFAYGSNLLTERIHLRNPSAAFFCVARLQDFKLDFGNSQGKTSQTWHGGIATIFQSPGDEVWGVVWKMNKSNLNSLDEQEGVKSGMYVVIEVKVATQEGKEITCRSYLMTNYESAPPSPQYKKIICMGAKENGLPLEYQEKLKAIEPNDYTGKVSEEIEDIIKKGETQTL

SEQ ID NO: 1938 - DNA, 1453 bp, Homo sapien
gttggaaataactataacttaaagcaaatctaacccagtaagctatcaaaaagaaaaattatataattaccaagtagagttaatttcacctgagttctatgaacatattcattattaaaggaaacctcaaattattgtcccattggaagcaaaatatacatttataaatagccatttctcgttttaaaaaactaataacattgaaataaacagaaacttaagctcttctagtttgccaaaaaccagaaagcaaacatcatatactaaatgatgaaatgccaaagccatttccattatatcagaaacgagactaatacttcctgtcatcatttacatgattgtcactattattaagcattgttttggtagttctagccattgcagtaagacagtagacagaaagtcaaataattggcataaatattggaaacaaaaaattatttctactttgaaatgatacaatagaatagctggaaagcccagggggactctagtagaaaacagcaatgaggattaaatgtaagacactttggaaagctgatgtgtgagaaatgtacacaaactaatagctttctctttattagtagtcatcagttgaaaatggaaatgaccaagcaaaaatattcaacagaatgacaaaactattggttacacctaggaataaatgtgttaaagaaaggtacagagtgaaggtaatgacccttatgaagaaaacttgatattataaaaagtagtccttttctccctcagtttttgtcttcaaaatgtttacttgggacagatcgtggtttacatgatggtcctcaaacatattgtgaacaacattaaaaaaaaaagacacattttactcaataagtaacattttttgagaagctactatgtgctagggacctagtttttagtgcagtggtctccaaaataatgtactggcagtatgggaagagcgtttagaacactgtacctttttatttgggaggagaaaagaaacctttgtcaaatatttaacacctgctgccagaggtctgtagatttgatgattgtgtgccatgagttacacacagactcctaaatcagtttcacctgtggtgtcctcattctgtttactttgagcattttgcattctatatctgcttagttatatggatttattcgtcccatataatatgtgtagccacatggacacatgttttaaaaggttttaaattctgcaagatagtgacgatgatgtaaacacaagaaaagggcaaatggatacattttcctactctgtgctcatcaaacatattacaggataaaattattggctatctaataaaaacacagactaataagacctgataagttggacaaaatgtttaaaaattaacatgaagatgataggaagtatgaatctatattcactgtcattaatgtcaaacctttaccttatggtatattgtactttgagaaatta

SEQ ID NO: 1939 - protein, 14 aa, Homo sapien
MSNLYLMVYCTLRN

SEQ ID NO: 1940 - DNA, 4943 bp, Homo sapien
gcgaaaacaaaaatgccgcctaattggtcactggccctttctcatgaatgaaggaggtttctgttttaagaaataaagtgactcctcagccgttgattcactgcccacagggagattttgagcagaggcttcctaggctccgtagaaatttgcatacagcttccacttcctgcttcagagcctgttcttctacttacctgggcccggagaaggtggagggagacgagaagccgccgagagccgactaccctccgggcccagtctgtctgtccgtggtggatctaagaaactagaatgaaccgaagcattcctgtggaggttgatgaatcagaaccatacccaagtcagttgctgaaaccaatcccagaatattccccggaagaggaatcagaaccacctgctccaaatataaggaacatggcacccaacagcttgtctgcacccacaatgcttcacaattcctccggagacttttctcaagctcactcaaccctgaaacttgcaaatcaccagcggcctgtatcccggcaggtcacctgcctgcgcactcaagttctggaggacagtgaagacagtttctgcaggagacacccaggcctgggcaaagctttcccttctgggtgctctgcagtcagcgagcctgcgtctgagtctgtggttggagccctccctgcagagcatcagttttcatttatggaaaaacgtaatcaatggctggtatctcagctttcagcggcttctcctgacactggccatgactcagacaaatcagaccaaagtttacctaatgcctcagcagactccttgggcggtagccaggagatggtgcaacggccccagcctcacaggaaccgagcaggcctggatctgccaaccatagacacgggatatgattcccagccccaggatgtcctgggcatcaggcagctggaaaggcccctgcccctcacctccgtgtgttacccccaggacctccccagacctctcaggtccagggagttccctcagtttgaacctcagaggtatccagcatgtgcacagatgctgcctcccaatctttccccacatgctccatggaactatcattaccattgtcctggaagtcccgatcaccaggtgccatatggccatgactaccctcgagcagcctaccagcaagtgatccagccggctctgcctgggcagcccctgcctggagccagtgtgagaggcctgcaccctgtgcagaaggttatcctgaattatcccagcccctgggaccaagaagagaggcccgcacagagagactgctcctttccggggctttcaaggcaccaggaccagccacatcaccagccacctaatagagctggtgctcctggggagtccttggagtgccctgcagagctgagaccacaggttccccagcctccgtccccagctgctgtgcctagaccccctagcaaccctccagccagaggaactctaaaaacaagcaatttgccagaagaattgcggaaagtctttatcacttattcgatggacacagctatggaggtggtgaaattcgtgaactttttgttggtaaatggcttccaaactgcaattgacatatttgaggatagaatccgaggcattgatatcattaaatggatggagcgctaccttagggataagaccgtgatgataatcgtagcaatcagccccaaatacaaacaggacgtggaaggcgctgagtcgcagctggacgaggatgagcatggcttacatactaagtacattcatcgaatgatgcagattgagttcataaaacaaggaagcatgaatttcagattcatccctgtgctcttcccaaatgctaagaaggagcatgtgcccacctggcttcagaacactcatgtctacagctggcccaagaataaaaaaaacatcctgctgcggctgctgagagaggaagagtatgtggctcctccacgggggcctctgcccacccttcaggtggttcccttgtgacaccgttcatccccagatcactgaggccaggccatgtttggggcccttgttctgacagcattctggctgaggctggtcggtagcactcctggctggtttttttctgttcctccccgagaggccctctggcccccaggaaacctgttgtgcagagctcttccccggagacctccacacaccctggctttgaagtggagtctgtgactgctctgcattctctgcttttaaaaaaaccattgcaggtgccagtgtcccatatgttcctcctgacagtttgatgtgtccattctgggcctctcagtgcttagcaagtagataatgtaagggatgtggcagcaaaaggaaatgactacaaacactctcctatcaatcacttcaggctacttttatgagttagccagatgcttgtgtatcctcagaccaaactgattcatgtacaaataataaaatgtttactcttttgtaagattatgttttacttatctcaaaggagatacatataatttataatgatatgggcagttgcttccagggacatcaacaaagctgcttagatataatattagataaatataacagaccactctgtattaatggattaaagccagctagttaaacaaccctttttaaccataatcatggaagctttattcttgcaataaagatttttaggctgggcgcagtggctcacacctgtaatcccagcactttgggaagctaaggcaggcagatcatttgaggtcaggagtttgagaccagcctggccaacatggtgaaaccccatctctgctaaaattacaagaaagttagccgggcatggtggtgtgcacctgtaatcccagctactcgggaggctgaggcaggagaatcacttgaacccgggaggcagaggttgcagtgagccgagatcatgtcactgcactctagcttgggagacagagcgagactccgtctcaaaaaacaaacaaacaaataaaacacccatttttaacaaaacaactttatatagcatacagccatgattctaaatagtatgattatggttctcaggatctgactacataggtaaaaatatttgcatatgtgtatgaagtgttgggggatgtaggctagaattgtagtctgtgttctaattttggttctaccaccaattagctgtatgacctttagcaagtcctttaacttttcttagattccagggactcatttataaaatgacatggacaaaagcatctctaatcactctaaaagatttgaagtctaggacctaaattctaaatactcttttgaggagtgactgagttttcattttcataattatgtctctcagaggacaaatttacattttcttaacagagacattttcttcttctttttttttgtttgagacagagtctcgctctgtcgtccaggctggagtgcagtgctgcaatcttggctcactgcaacctgcgcctcctgggttcaagtgattcttctgcctcaacctcccaagtagctagacctataggcgcctgccaccatgcccagctaatttttgtatttttagtagagacagggtttcatattggccagactggtctcgaactcctgaccttgtgatccgcccacctcggcctcccaaagtgctgggattacaggtgtgagccaccacacccagccaacattttcctcttttaaaaaatatcttctcacgcctgtaatcccagcactttgggaggctgaggcaggcggatcatgaggtcaggagatcaagaccatcctggctaacacggtgaaactccatctctactaaaaatacaaaaaaaatagccgggcgtggtggcaggcgcctgtagtcccagctactggggaggctgaggcaggaaaatggtgtcaacccgggaggcggagcttgcagtgagccgagattgcgccactgcactccagcctgggcaatagagtgagactccgtctcaaaaaaaaaaaaaaaaaaaaaaacttcaacaataccctcaggttgataattttggatatctatctgtatctatatatcttgtttacctggtctccagaaaaagaacacatacacatatccatatataaaatatgtatacatgtatcaaatctacgtaaactataaaggtgggatggctttaattatggcccaagctactaagacaatgaagactttttggggctgcaagctactgcttcccttctttatctactagcctcttaaacaaggctcacttgtgctacaagacagtccaccgttttgttttttttttcttttttttgagacagggtctcactctttcccaggctgcagtacagtgacacagtctcagctcactgcagctttgaccttgccgggctcaggtgacccttacacttcagcctcccaagtagcagggactataggtgtgcaccaacatgcttggttaatttttgtattttttgtagagacagggttttgccatgttgtccaggctagtctcgaattcctgggctcaagtgattcacctgccttggcctcccaaagtgctaggattacagatgggagccaccacgcccagcccagtccagctcttatatgtagcacagggaaaggacaaatacttgtcaactataaataagaaacattgctaatgcattgcaaagaacactagtttcatttactttataacttagatgtctactgggtgagacgaatgtctttgttctttaaaaaataggaaaagagaagaaaaactagcataacataagtactcatttgtaagactttctgacatgtaacattagttccgtagttttgagacctggtagaactgactttcatatttggataacctggaaaacacccaaacacaaacttcaagtcttctttctcttttttcattatcttttttagtctgaggtgacaccatcattaaggattcgacacccgtttgtaaataaaatgacatcag

SEQ ID NO: 1941 - protein, 565 aa, Homo sapien
MNRSIPVEVDESEPYPSQLLKPIPEYSPEEESEPPAPNIRNMAPNSLSAPTMLHNSSGDFSQAHSTLKLANHQRPVSRQVTCLRTQVLEDSEDSFCRRHPGLGKAFPSGCSAVSEPASESVVGALPAEHQFSFMEKRNQWLVSQLSAASPDTGHDSDKSDQSLPNASADSLGGSQEMVQRPQPHRNRAGLDLPTIDTGYDSQPQDVLGIRQLERPLPLTSVCYPQDLPRPLRSREFPQFEPQRYPACAQMLPPNLSPHAPWNYHYHCPGSPDHQVPYGHDYPRAAYQQVIQPALPGQPLPGASVRGLHPVQKVILNYPSPWDQEERPAQRDCSFPGLSRHQDQPHHQPPNRAGAPGESLECPAELRPQVPQPPSPAAVPRPPSNPPARGTLKTSNLPEELRKVFITYSMDTAMEVVKFVNFLLVNGFQTAIDIFEDRIRGIDIIKWMERYLRDKTVMIIVAISPKYKQDVEGAESQLDEDEHGLHTKYIHRMMQIEFIKQGSMNFRFIPVLFPNAKKEHVPTWLQNTHVYSWPKNKKNILLRLLREEEYVAPPRGPLPTLQVVPL

SEQ ID NO: 1942 - DNA, 2587 bp, Homo sapien
ggcacacacgaggaggagggttgagctgctgccgccgccgcctctgtcgtcgtcgcgagtgtggagtcgggactggagctgctgccgcggcgacgccggggatctttgtcgctagctcccggcccttctgccccgccgccttccctcagtcagcgttgcccactcctctccggccgggcgcccctgcctccatttctcgctctctgtccaccacacacacggcccccccgatcatggatccgggcagtggcggcggcggcggcggcggcggcggcggcgggagcagcagcggcagcagcagcagcgactcggcgcctgactgctgggaccaggcggacatggaagcccccgggccgggcccttgcggcggcggcggcttccctggcggcggcggccgaggcccagcgggagaacctcagcgcggccttcagccggcaactcaacgtcaacgccaagcccttcgtgcccaacgtccacgccgccgagttcgtgccgtccttcctgcggggcccggcagcgccgccacccccagctggcggcgccgccaataaccacggagccggcagcggcgcgggaggccgtgcggcacctgtggaatcctctcaagaggaacagtcattgtgtgaaggttcaaattcagctgttagcatggaactttcagaacctattgtagaaaatggagagacagaaatgtctccagaagaatcatgggagcacaaagaagaaataagtgaagcagagccagggggtggttccttgggagatggaaggccgccagaggaaagtgcccatgaaatgatggaggaggaagaggaaatcccaaaacctaagtctgtggttgcaccgccaggtgctcctaagaaagagcatgtaaatgtagtattcattgggcacgtagatgctggcaagtcaaccattggaggacaaataatgtatttgactggaatggttgacaaaaggacgcttgaaaagtatgaaagagaagctaaagagaaaaacagagaaacttggtacttgtcttgggccttagacacaaatcaggaagaacgagacaagggtaaaacagtagaagtgggtcgtgcctattttgaaaccgaaaagaagcatttcacaattctagatgcccctggccacaagagttttgtcccaaatatgattggtggtgcctctcaagctgatttggctgtgctggtaatctcagccaggaaaggagagtttgaaactggatttgaaaaaggaggacagacaagagaacatgcaatgttggcaaagacagcaggtgtaaaacacctaattgtgctaattaataagatggatgatccaacagtaaattggagcaatgagagatatgaagaatgtaaggagaaactagtgccatttttgaaaaaagttggcttcaatcccaaaaaggacattcactttatgccctgctcaggacttactggagcaaatctcaaagagcagtcggatttctgtccttggtacattggattaccgtttattccatatctggataatttgccgaacttcaatagatcagttgatggaccaatcaggctgccaattgtggataagtacaaggatatgggcactgtggtcctgggaaagctggaatcaggatctatttgtaaaggccagcagcttgtgatgatgccaaacaagcacaacgtggaagttcttggaatactttccgatgatgtagagactgataccgtagccccaggtgaaaacctcaaaatcagactgaaaggaattgaagaagaggagattcttccagggtttatactttgtgatcctaataatctttgtcattctggacgcacatttgatgcccagatagtgattatagagcacaaatccatcatctgcccaggctataatgcggtgctgcatattcatacctgtattgaggaggtggaaataacagccttaatctgcttggtagacaaaaaatcaggagaaaaaagtaagacccgaccccgttttgtgaaacaagatcaagtatgcattgctcgcttaaggacagcaggaaccatctgccttgagacctttaaagacttccctcagatgggtcgtttcaccttaagagatgagggtaagaccattgcaattggaaaagttctgaaactggttccagagaaagactaagcattttcttgatgaccctgcacaatactgtgaggaaaattgactgcagaagcctacttcacaccgccttctcttattttctgcccattgataaacctctccccatattttgcaaagaggaaattcacagcaaaagtccacattatgtcagctttctcatattgagagctctgctatgccactgttgaatttttcccaagattcctgtccctagccctcacttcaaactctgcttccttggacagatttggcaatagctttgtaagtgatgtggacataattgcctacaataatgaaaacctacaggaatttttttatttttcattttccccttaggcatatttagtatttttcccccaggccagatcattcgtgagtgtgcgagtgtgtgtgcacatgttacaaaggcaactaccatgttaataaaatattcaatttg

SEQ ID NO: 1943 - protein, 499 aa, Homo sapien
MELSEPIVENGETEMSPEESWEHKEEISEAEPGGGSLGDGRPPEESAHEMMEEEEEIPKPKSVVAPPGAPKKEHVNVVFIGHVDAGKSTIGGQIMYLTGMVDKRTLEKYEREAKEKNRETWYLSWALDTNQEERDKGKTVEVGRAYFETEKKHFTILDAPGHKSFVPNMIGGASQADLAVLVISARKGEFETGFEKGGQTREHAMLAKTAGVKHLIVLINKMDDPTVNWSNERYEECKEKLVPFLKKVGFNPKKDIHFMPCSGLTGANLKEQSDFCPWYIGLPFIPYLDNLPNFNRSVDGPIRLPIVDKYKDMGTVVLGKLESGSICKGQQLVMMPNKHNVEVLGILSDDVETDTVAPGENLKIRLKGIEEEEILPGFILCDPNNLCHSGRTFDAQIVIIEHKSIICPGYNAVLHIHTCIEEVEITALICLVDKKSGEKSKTRPRFVKQDQVCIARLRTAGTICLETFKDFPQMGRFTLRDEGKTIAIGKVLKLVPEKD

SEQ ID NO: 1944 - DNA, 1229 bp, Homo sapien
gtcgtggctcgttccattctcggcggtggtacctgctcccggtggccctgaggacgtgtgggccaggggcggccccgaaattaggaagcggagggggagcagtctgcaggtctgcggggctaagtgtcgcggcggcgcacctcgcgtcaagaatccggaggaggagactgcaaggataggcccaggagtaatggagtccaaagaggaactagcggcaaacaatctcaacggggaaaatgcccaacaagaaaacgaaggaggggagcaggcccccacgcagaatgaagaagaatcccgccatttgggagggggtgaaggccagaagcctggaggaaatatcaggcgggggcgagttaggcgacttgtccctaattttcgatgggccatacctaataggcatattgagcacaatgaagcgagagatgatgtagaaaggtttgtagggcagatgatggaaatcaagagaaagactagggaacagcagatgaggcactatatgcgcttccaaactcctgaacctgacaaccattatgacttttgcctcataccttgaatcctaaaagttttcgctgaggttaatgtgaacactgctttacaagcttgtatttttgtgatttactttttctgtaagccttttggtgtttacacttaccagtttctaatggaaattagaattctaattgaatattgttttgtctcagcctaaaagttacggtcagcatggcaattcacctattttaggaaaaatactcttttcataatatgaaatgcataaagcagttcaaaaagcagtctgtattccatcatcttcctttttcattccagtccttatttttgtaagtattacttttcctcctccggctacctggactcaaaatctcagttgtctttgacagtttttttcttgtccctgaccaaaaaagaatgatcatacccagaattcaatgtttgatattttaagaatgtatgttctagtgtttttcagagtgagtctaccatctgtataaaaacaccttgggggcaggcaggggcatttaaaaatgtaggacctatcgtccagactcacagagtggggctccagaatctccatttttaacaaactctcttaagtaattctgatgtgtaccaaaatcagtgccattggtgtgtgtgtacgtaactatatacatatgtgtgtgtgtgtatatatataatgtgtcataaccgtaaacaataaacaatatcaagat

SEQ ID NO: 1945 - protein, 120 aa, Homo sapien
MESKEELAANNLNGENAQQENEGGEQAPTQNEEESRHLGGGEGQKPGGNIRRGRVRRLVPNFRWAIPNRHIEHNEARDDVERFVGQMMEIKRKTREQQMRHYMRFQTPEPDNHYDFCLIP

SEQ ID NO: 1946 - DNA, 1417 bp, Homo sapien
cctcgtgccatgagcatttagaaatggagaccacttctggtgaattgtcagatgtttccaatgatcccaccacatctgtctgtgtagctagtgccccaacaaaagaagcaattgacaataccctgcttgaacacaaagaaagaagtgagaatataaatcttaatgaaaagcaaattccttttcaggtgcctaatattgaaaggaactttagacagtcacagcctaaatcctatctttgccattatgaactggctgaggcccttccacaaggaaagatgaatgagacaccaactgagtggctgcgttataattcaggaatccttaacacacaacccacccattaccattcaaagaagcacatgtcagtggtcatacttttgtaacagctgagcaaatcctggctccattagctttaccagagcaagcattattgatcccactagaaaaccatgacaaattcaaaaatgtaccatgtgaggtctaccagcacattctgcagccaaacatgctggccaacaaggttaaatttacctttcctccagctgccctcccaccccctagcacacctctgcagcctttgcctttgcagcagtccttatgttctacctctgtaaccactatccatcacactgttttgcagcagcacgctgcagctgctgcagctgcagctgcagccgcagctgcaggaacctttaaagtgcttcagccacaccaacagtttctttcccaaatcccagctctcaccagaacctcattacctcagctctcagtaggaccagtaggaccgaggctttgtcctgggaaccagccaacttttgttgctcctcctcagatgccaatcattccagcttccgttcttcatcctagccatctggctttcccatctttaccccatgcactctttccttcactgctttccccacaccctactgtcatccctttgcaacctctcttctagtcatcaccataatgggaaaaaaatactcttgtgaaaactattgctatatgcgttaagtgttcatctatgtgggtacatggctatttaactggtggaaataaactggccgatacatggcgtcattggtttgaaatcatttactgtaagtgcaatgatgcaaataaatccctaagtttctgatatataatattattaaagcactgaatagtttgaaaatcaatacaatatatgctatatattaaaatgatgtcttaagagtatgtataatgtacataaaatatatttatagtactctaatttatgttgtaaagtatgctcccttggtttttcttaatctttgtgtatttgcacctatttaatgtttagacaaagctgatggcactatgttttgtatcatgttccttgaaactgtaaattcagtgaaaaatatctcttgcaataaatttttgttaactattt

SEQ ID NO: 1947 - protein, 150 aa, Homo sapien
MLANKVKFTFPPAALPPPSTPLQPLPLQQSLCSTSVTTIHHTVLQQHAAAAAAAAAAAAAGTFKVLQPHQQFLSQIPALTRTSLPQLSVGPVGPRLCPGNQPTFVAPPQMPIIPASVLHPSHLAFPSLPHALFPSLLSPHPTVIPLQPLF

SEQ ID NO: 1948 - DNA, 4054 bp, Homo sapien
cgccccggcgcggggccctgcggtagcctcaggcccctcccctggacccgccgcagagccagtgcagaatacagaaactgcagccatgaccacgcacgtcaccctggaagatgccctgtccaacgtggacctgcttgaagagcttcccctccccgaccagcagccatgcatcgagcctccaccttcctccatcatgtaccaggctaactttgacacaaactttgaggacaggaatgcatttgtcacgggcattgcaaggtacattgagcaggctacagtccactccagcatgaatgagatgctggaggaaggacatgagtatgcggtcatgctgtacacctggcgcagctgttcccgggccattccccaggtgaaatgcaacgagcagcccaaccgagtagagatctatgagaagacagtagaggtgctggagccggaggtcaccaagctcatgaagttcatgtattttcagcgcaaggccatcgagcggttctgcagcgaggtgaagcggctgtgccatgccgagcgcaggaaggactttgtctctgaggcctacctcctgacccttggcaagttcatcaacatgtttgctgtcctggatgagctaaagaacatgaagtgcagcgtcaagaatgaccactctgcctacaagagggcagcacagttcctgcggaagatggcagatccccagtctatccaggagtcgcagaacctttccatgttcctggccaaccacaacaggatcacccagtgtctccaccagcaacttgaagtgatcccaggctatgaggagctgctggctgacattgtcaacatctgtgtggattactacgagaacaagatgtacctgactcccagtgagaaacatatgctcctcaaggtgatgggctttggcctctacctaatggatggaaatgtcagtaacatttacaaactggatgccaagaagagaattaatcttagcaaaattgataaattctttaagcagctgcaggtggtgccccttttcggcgacatgcagatagagctggccagatacattgagaccagtgctcactatgaagagaacaagtccaagtggacgtgcacccagagcagcatcagcccccagtacaatatctgcgagcagatggttcagatccgggatgaccacatccgcttcatctccgagctcgctcgctacagcaacagtgaggtggtgacgggctcagggctggacagccagaagtcagacgaggagtatcgcgagctcttcgacctagccctgcggggtctgcagcttctatccaagtggagcgcccacgtcatggaggtgtactcttggaagctggttcatcccacagacaagttctgcaacaaggactgtcctggcaccgcggaggaatatgagagagccacacgctacaattacaccagtgaggaaaaatttgccttcgttgaggtgatcgccatgatcaaaggcctgcaggtgctcatgggcaggatggagagcgtcttcaaccaggccatcaggaacaccatctacgcggcattgcaggacttcgcccaggtgacgctgcgtgagcccctgcggcaggcggtacggaagaagaagaatgtcctcatcagcgtcctacaggcaattcgaaagaccatctgtgactgggagggagggcgagagccccctaatgacccatgcttgagaggggagaaggaccccaaaggtggatttgatatcaaggtgccccggcgtgctgtggggccatccagcacacagctgtacatggtgcggaccatgcttgaatcactcattgcagacaaaagcggctccaagaagaccctgaggagcagcctggatggacccattgtcctcgccatagaggactttcacaaacagtccttcttcttcacacatctgctcaacatcagtgaagccctgcagcagtgttgtgacctctcccagctctggttccgagaattcttcctggagttaaccatgggccgacgaatccagttccccatcgagatgtccatgccctggattctaacggaccatatcctggaaaccaaagaaccttccatgatggagtatgtcctctaccctctggatctgtacaacgacagcgcctactatgctctgaccaagtttaaaaagcagttcctgtacgatgagatagaagctgaggtgaacctgtgttttgatcagtttgtctacaagctggcagaccagatctttgcttactacaaagccatggctggcagtgtcctgttggataaacgttttcgagctgagtgtaagaattatggcgtcatcattccgtatccaccgtccaatcgctatgaaacactgctgaagcagagacacgtccagctgttgggtagatcaattgacttgaacagactcattacccagcgcatctctgccgccatgtataaatccttggaccaagctatcagccgctttgagagtgaggacctgacctccattgtggagctggagtggctgctggagattaaccggctcacgcatcggctgctctgtaagcatatgacgctggacagcttcgatgccatgttccgagaggccaatcacaatgtgtccgccccctatggccgtatcaccctgcatgtcttctgggaactgaactttgactttctccccaactactgctacaatgggtccactaaccgttttgtgcggactgccattcctttcacccaagaaccacaacgagacaaacctgccaacgtccagccttattacctctatggatccaagcctctcaacattgcctacagccacatctacagctcctacaggaatttcgtggggccacctcatttcaagactatctgcagactcctgggttatcagggcatcgctgtggtcatggaggaactgctaaagattgtgaagagcttgctccaaggaaccattctccagtatgtgaaaacactgatagaggtgatgcccaagatatgccgcttgccccgacatgagtatggctccccagggatcctggagttcttccaccaccagctgaaggacatcattgagtacgcagagctcaaaacagacgtgttccagagcctgagggaagtgggcaatgccatcctcttctgcctcctcatagagcaagctctgtctcaggaggaggtctgcgatttgctccatgccgcacccttccaaaacatcttgcctagagtctacatcaaagagggggagcgcctggaggtccggatgaaacgtctggaagccaagtatgccccgctccacctggtccctctgatcgagcggctggggacccctcagcaaatcgccattgctcgcgagggtgacctcctgaccaaggagcggctgtgctgtggcctgtccatgttcgaggtcatcctgacccgcattcggagctacctgcaggaccccatctggcggggcccaccgcccaccaatggcgtcatgcacgtcgatgagtgtgtggagttccaccggctgtggagcgccatgcagttcgtgtactgcatccctgtgggaaccaacgagttcacagctgagcagtgtttcggcgatggcttgaactgggttggttgctccatcattgtcctgctgggccagcagcgtcgctttgacctgttcgacttctgttaccacctgctaaaagtgcagaggcaggacgggaaggatgaaatcattaagaatgtgcccctgaagaagatggccgaccggatcaggaagtatcagatcttgaacaatgaggtttttgccatcctgaacaaatacatgaagtccgtggagacagacagttccactgtggagcatgtgcgctgcttccagccacccatccaccagtccttggccaccacttgctaagcagaagatcctgcagacccttatctggaggaggaagagaagcaggagagagaaagccacagccagcctgccataggatccaactggacaacgtgtgggatggacctggaaacaagcacctccccaaacacatcaccactccctagggcggggcctgtgcatgctctcccatgacatctccatgctggtttctccatagcataaatg

SEQ ID NO: 1949 - protein, 1281 aa, Homo sapien
APARGPAVASGPSPGPAAEPVQNTETAAMTTHVTLEDALSNVDLLEELPLPDQQPCIEPPPSSIMYQANFDTNFEDRNAFVTGIARYIEQATVHSSMNEMLEEGHEYAVMLYTWRSCSRAIPQVKCNEQPNRVEIYEKTVEVLEPEVTKLMKFMYFQRKAIERFCSEVKRLCHAERRKDFVSEAYLLTLGKFINMFAVLDELKNMKCSVKNDHSAYKRAAQFLRKMADPQSIQESQNLSMFLANHNRITQCLHQQLEVIPGYEELLADIVNICVDYYENKMYLTPSEKHMLLKVMGFGLYLMDGNVSNIYKLDAKKRINLSKIDKFFKQLQVVPLFGDMQIELARYIETSAHYEENKSKWTCTQSSISPQYNICEQMVQIRDDHIRFISELARYSNSEVVTGSGLDSQKSDEEYRELFDLALRGLQLLSKWSAHVMEVYSWKLVHPTDKFCNKDCPGTAEEYERATRYNYTSEEKFAFVEVIAMIKGLQVLMGRMESVFNQAIRNTIYAALQDFAQVTLREPLRQAVRKKKNVLISVLQAIRKTICDWEGGREPPNDPCLRGEKDPKGGFDIKVPRRAVGPSSTQLYMVRTMLESLIADKSGSKKTLRSSLDGPIVLAIEDFHKQSFFFTHLLNISEALQQCCDLSQLWFREFFLELTMGRRIQFPIEMSMPWILTDHILETKEPSMMEYVLYPLDLYNDSAYYALTKFKKQFLYDEIEAEVNLCFDQFVYKLADQIFAYYKAMAGSVLLDKRFRAECKNYGVIIPYPPSNRYETLLKQRHVQLLGRSIDLNRLITQRISAAMYKSLDQAISRFESEDLTSIVELEWLLEINRLTHRLLCKHMTLDSFDAMFREANHNVSAPYGRITLHVFWELNFDFLPNYCYNGSTNRFVRTAIPFTQEPQRDKPANVQPYYLYGSKPLNIAYSHIYSSYRNFVGPPHFKTICRLLGYQGIAVVMEELLKIVKSLLQGTILQYVKTLIEVMPKICRLPRHEYGSPGILEFFHHQLKDIIEYAELKTDVFQSLREVGNAILFCLLIEQALSQEEVCDLLHAAPFQNILPRVYIKEGERLEVRMKRLEAKYAPLHLVPLIERLGTPQQIAIAREGDLLTKERLCCGLSMFEVILTRIRSYLQDPIWRGPPPTNGVMHVDECVEFHRLWSAMQFVYCIPVGTNEFTAEQCFGDGLNWVGCSIIVLLGQQRRFDLFDFCYHLLKVQRQDGKDEIIKNVPLKKMADRIRKYQILNNEVFAILNKYMKSVETDSSTVEHVRCFQPPIHQSLATTC

SEQ ID NO: 1950 - DNA, 570 bp, Homo sapien
  Unsure 148: Unknown base
  Unsure 151-152: Unknown base
aagaaccaaatgttataaatatttgctgaagtttatacattttaatctgcattaaggtaatggttagttggtcaatgctgcctctgcctcagtctgcagcgagaacattgtgttttcatttggtaaatacagttgagcatccaccggngtnncaagtggctggtattaggtgctaaggatgcaggggtgaacaaaacaggcccctgcctccatgcaattctcattctctgggtggcacagttttatgcaagttatcacatgtgaaagaatttatagtttttattatgcaagttttcaaataaatccaattgctgttatcttttgtttttcatggaatatctcgcatctcagaacacagtttgggaatcatattttatttagtgttttcagatgctatctattatatctaagatatttcacatttagccattcgttttataaaaaactccaggcaaactcagctggacttttcttgctttaataacagctttattgaggatacaattcacatatctacgaaattctttttaaaaattttacacgttcaggccgggcgcggtggctcatgcc

SEQ ID NO: 1951 - protein, 119 aa, Homo sapien
MQFSFSGWHSFMQVITCERIYSFYYASFQINPIAVIFCFSWNISHLRTQFGNHILFSVFRCYLLYLRYFTFSHSFYKKLQANSAGLFLLNNSFIEDTIHISTKFFLKILHVQAGRGGSC

SEQ ID NO: 1952 - DNA, 1875 bp, Homo sapien
aaagcatccagttcctttgcggtcctcttcttcagcacatgccaaagctgttcctcacggcctgtgagacaagagcatcttggatgtaggacaatggaagagttagatgccttattggaggaactggaacgctccacccttcaggacagtgatgaatattccaacccagctcctcttcccctggatcagcattccagaaaggagactaaccttgatgagacttcggagatcctttctattcaggataacacaagtcccttgccggcgcagctcgtgtatactaccaatatccaggagctcaatgtctacagtgaagcccaagagccaaaggaatcaccaccaccttctaaaacgtcagcagctgctcagttggatgagctcatggctcacctgactgagatgcaggccaaggttgcagtgagagcagatgctggcaagaagcacttaccagacaagcaggatcacaaggcctccctggactcaatgcttgggggtctggagcaggaattgcaggaccttggcattgccacagtgcccaagggccattgtgcatcctgccagaaaccgattgctgggaaggtgatccatgctctagggcaatcatggcatcctgagcattttgtctgtactcattgcaaagaagagattggctccagtcccttctttgagcggagtggcttggcctactgccccaacgactaccaccaacttttttctccacgctgtgcttactgcgctgctcccatcctggataaagtgctgacagcaatgaaccagacctggcacccagagcacttcttctgctctcactgcggagaggtgtttggtgcagaaggctttcatgagaaggacaagaagccatattgccgaaaggatttcttagccatgttctcacccaagtgtggtggctgcaatcgcccagtgttggaaaactacctttcagccatggacactgtctggcacccagagtgctttgtttgtggggactgcttcaccagtttttctactggctccttctttgaactggatggacgtccattctgtgagctccattaccatcaccgccggggaacgctctgccatgggtgtgggcagcccatcactggccgttgtatcagtgccatggggtacaagttccatcctgagcactttgtgtgtgctttctgcctgacacagttgtcgaagggcattttcagggagcagaatgacaagacctattgtcaaccttgcttcaataagctcttcccactgtaatgccaactgatccatagcctcttcagattccttataaaatttaaaccaagagaggagaggaaagggtaaattttctgttactgaccttctgcttaatagtcttatagaaaaaggaaaggtgatgagcaaataaaggaacttctagactttacatgactaggctgataatcttattttttaggcttctatacagttaattctataaattctctttctccctctcttctccaatcaagcacttggagttagatctaggtccttctatctcgtccctctacagatgtattttccacttgcataattcatgccaacactggttttcttaggtttctccattttcacctctagtgatggccctactcatatcttctctaatttggtcctgatacttgtttcttttcacgttttcccatttgccctgtggctcactgtcttacaatcactgctgtggaatcatgataccacttttagctctttgcatcttccttcagtgtatttttgtttttcaagaggaagtagattttaactggacaactttgagtactgacatcattgataaataaactggcttgtggtttcaataaaaaaaaaaaaaaaaaaaaaaaaaaaaaaaaaaaaaaa

SEQ ID NO: 1953 - protein, 386 aa, Homo sapien
MEELDALLEELERSTLQDSDEYSNPAPLPLDQHSRKETNLDETSEILSIQDNTSPLPAQLVYTTNIQELNVYSEAQEPKESPPPSKTSAAAQLDELMAHLTEMQAKVAVRADAGKKHLPDKQDHKASLDSMLGGLEQELQDLGIATVPKGHCASCQKPIAGKVIHALGQSWHPEHFVCTHCKEEIGSSPFFERSGLAYCPNDYHQLFSPRCAYCAAPILDKVLTAMNQTWHPEHFFCSHCGEVFGAEGFHEKDKKPYCRKDFLAMFSPKCGGCNRPVLENYLSAMDTVWHPECFVCGDCFTSFSTGSFFELDGRPFCELHYHHRRGTLCHGCGQPITGRCISAMGYKFHPEHFVCAFCLTQLSKGIFREQNDKTYCQPCFNKLFPL

SEQ ID NO: 1954 - DNA, 1043 bp, Homo sapien
ggcacgagggtctacccgcccctgccctgaggaccctagtccaacatggcggcgcccagcggagggtggaacggcgtcggcgcgagcttgtgggccgcgctgctcctaggggccgtggcgctgaggccggcggaggcggtgtccgagcccacgacggtggcgtttgacgtgcggcccggcggcgtcgtgcattccttctcccataacgtgggcccgggggacaaatatacgtgtatgttcacttacgcctctcaaggagggaccaatgagcaatggcagatgagtctggggaccagcgaagaccaccagcacttcacctgcaccatctggaggccccaggggaagtcctatctgtacttcacacagttcaaggcagaggtgcggggcgctgagattgagtacgccatggcctactctaaagccgcatttgaaagggaaagtgatgtccctctgaaaactgaggaatttgaagtgaccaaaacagcagtggctcacaggcccggggcattcaaagctgagctgtccaagctggtgattgtggccaaggcatcgcgcactgagctgtgaccagcagccctgttgcgggtggcaccttctcatctccggtgaagctgaaggggcctgtgtccctgaaagggccagcacatcactggttttctaggagggactcttaagttttctacctgggctgacgttgccttgtccggaggggcttgcagggtggctgaagccctggggcagagaacagagggtccagggccctcctggctcccaacagcttctcagttcccacttcctgctgagctcttctggactcaggatcgcagatccggggcacaaagagggtggggaacatgggggctatgctggggaaagcagccatgctccccccgacctccagccgagcatccttcatgagcctgcagaactgctttcctatgtttacccaggggacctcctttcagatgaactgggaagagatgaaatgttttttcatatttaaataaataagaacattaaaaagcaaaaaaaaaaaaaaaaaa

SEQ ID NO: 1955 - protein, 173 aa, Homo sapien
MAAPSGGWNGVGASLWAALLLGAVALRPAEAVSEPTTVAFDVRPGGVVHSFSHNVGPGDKYTCMFTYASQGGTNEQWQMSLGTSEDHQHFTCTIWRPQGKSYLYFTQFKAEVRGAEIEYAMAYSKAAFERESDVPLKTEEFEVTKTAVAHRPGAFKAELSKLVIVAKASRTEL

SEQ ID NO: 1956 - DNA, 739 bp, Homo sapien
ctaacccagaaacatccaattctcaaactgaagctcgcactctcgcctccagcatgaaagtctctgccgcccttctgtgcctgctgctcatagcagccaccttcattccccaagggctcgctcagccagatgcaatcaatgccccagtcacctgctgttataacttcaccaataggaagatctcagtgcagaggctcgcgagctatagaagaatcaccagcagcaagtgtcccaaagaagctgtgatcttcaagaccattgtggccaaggagatctgtgctgaccccaagcagaagtgggttcaggattccatggaccacctggacaagcaaacccaaactccgaagacttgaacactcactccacaacccaagaatctgcagctaacttattttcccctagctttccccagacaccctgttttattttattataatgaattttgtttgttgatgtgaaacattatgccttaagtaatgttaattcttatttaagttattgatgttttaagtttatctttcatggtactagtgttttttagatacagagacttggggaaattgcttttcctcttgaaccacagttctacccctgggatgttttgagggtctttgcaagaatcattaatacaaagaattttttttaacattccaatgcattgctaaaatattattgtggaaatgaatattttgtaactattacaccaaataaatatatttttgtacaaaaaaaaaaaaaa

SEQ ID NO: 1957 - protein, 99 aa, Homo sapien
MKVSAALLCLLLIAATFIPQGLAQPDAINAPVTCCYNFTNRKISVQRLASYRRITSSKCPKEAVIFKTIVAKEICADPKQKWVQDSMDHLDKQTQTPKT

SEQ ID NO: 1958 - DNA, 305 bp, Homo sapien
ccccagccaccctgaaccagttacctctgtacttttacgctcgggatgcaagctgtcttgtactaactaagaagttaagcctaatctttttgtactgttgacacgtatgcttatttatcacaatcaggaaatgctttctcattttagctcaaggatctaaatttacttgatcgctgtataaaagaaacattaagacttagacctcctataatgatcatgatgagaatggccagaactcctcaggtgagtatcttggctacatcttcccctctatacccccagttatttatcaaaaagaagaaata

SEQ ID NO: 1959 - protein, 30 aa, Homo sapien [sequence omitted]

SEQ ID NO: 1960 - DNA, 3161 bp, Homo sapien
agcgaccgcagccggggggacgcgggaggatggagcaagtggagatcctgaggaaattcatccagagggtccaggccatgaagagtcctgaccacaatggggaggacaacttcgcccgggacttcatgcggttaagaagattgtctaccaaatatagaacagaaaagatatatcccacagccactggagaaaaagaagaaaatgttaaaaagaacagatacaaggacatactgccatttgatcacagccgagttaaattgacattaaagactccttcacaagattcagactatatcaatgcaaattttataaagggcgtctatgggccaaaagcatatgtagcaactcaaggacctttagcaaatacagtaatagatttttggaggatgatatgggagtataatgttgtgatcattgtaatggcctgccgagaatttgagatgggaaggaaaaaatgtgagcgctattggcctttgtatggagaagaccccataacgtttgcaccatttaaaatttcttgtgaggatgaacaagcaagaacagactacttcatcaggacactcttacttgaatttcaaaatgaatctcgtaggctgtatcagtttcattatgtgaactggccagaccatgatgttccttcatcatttgattctattctggacatgataagcttaatgaggaaatatcaagaacatgaagatgttcctatttgtattcattgcagtgcaggctgtggaagaacaggtgccatttgtgccatagattatacgtggaatttactaaaagctgggaaaataccagaggaatttaatgtatttaatttaatacaagaaatgagaacacaaaggcattctgcagtacaaacaaaggagcaatatgaacttgttcatagagctattgcccaactgtttgaaaaacagctacaactatatgaaattcatggagctcagaaaattgctgatggagtgaatgaaattaacactgaaaacatgatcagctccatagagcctgaaaaacaagattctcctcctccaaaaccaccaaggacccgcagttgccttgttgaaggggatgctaaagaagaaatactgcagccaccggaacctcatccagtgccacccatcttgacaccttctcccccttcagcttttccaacagtcactactgtgtggcaggacaatgatagataccatccaaagccagtgttgcatatggtttcatcagaacaacattcagcagacctcaacagaaactatagtaaatcaacagaacttccagggaaaaatgaatcaacaattgaacagatagataaaaaattggaacgaaatttaagttttgagattaagaaggtccctctccaagagggaccaaaaagttttgatgggaacacacttttgaataggggacatgcaattaaaattaaatctgcttcaccttgtatagctgataaaatctctaagccacaggaattaagttcagatctaaatgtcggtgatacttcccagaattcttgtgtggactgcagtgtaacacaatcaaacaaagtttcagttactccaccagaagaatcccagaattcagacacacctccaaggccagaccgcttgcctcttgatgagaaaggacatgtaacgtggtcatttcatggacctgaaaatgccatacccatacctgatttatctgaaggcaattcctcagatatcaactatcaaactaggaaaactgtgagtttaacaccaagtcctacaacacaagttgaaacacctgatcttgtggatcatgataacacttcaccactcttcagaacacccctcagttttactaatccacttcactctgatgactcagactcagatgaaagaaactctgatggtgctgtgacccagaataaaactaatatttcaacagcaagtgccacagtttctgctgccactagtactgaaagcatttctactaggaaagtattgccaatgtccattgctagacataatatagcaggaacaacacattcaggtgctgaaaaagatgttgatgttagtgaagattcacctcctcccctacctgaaagaactcctgaatcgtttgtgttagcaagtgaacataatacacctgtaagatcggaatggagtgaacttcaaagtcaggaacgatctgaacaaaaaaagtctgaaggcttgataacctctgaaaatgagaaatgtgatcatccagcgggaggtattcactatgaaatgtgcatagaatgtccacctactttcagtgacaagagagaacaaatatcagaaaatccaacagaagccacagatattggttttggtaatcgatgtggaaaacccaaaggaccaagagatccaccttcagaatggacatgattcagggagctagaagacactttaagttatactggaaaattcaggtgccactgaaagccagatttatagtattccatctttaatatgtgggactaacagcagtgtagattgttaccttaatattttttgctgggaccatctacctgccttatactacacttaggaaaaagtattacatatggtttattttgaaacttcaagtattattgccttaatgtctcttaaccctgttacacgctgcttgtagacatgttaatatagtaatacctttatgatatattgagtttaaggactactctttttctgttttatcatgtatgcattattttgtatatgtacagggcaagtaggtatataatttgataaagttgcaattgaaatattattaacagaagatgtaagaaatttctgcatggtctaaatctttgtgtactttatttgtaaattatttgccctggagttttagaaaatagtttctgaattttaaacttgctggattcatgcagccagctttgcaggttatcagagatcaaagattgtaataataattttgtaaattgtaagcaaaaagttatttttatattatatacagtctaattgttcatcctaattgttcctgttttcatctagtcagagattcagtaagtgccttggaacaatattgaattctcttagcttgtgtgtgtttctttaatatttgaactcaagtgggattagaagactatcaaaatacatgtatgtttcaggatatttgacctgtcattaaaaaaaacaaacagttttacagtg

SEQ ID NO: 1961 - protein, 780 aa, Homo sapien
MEQVEILRKFIQRVQAMKSPDHNGEDNFARDFMRLRRLSTKYRTEKIYPTATGEKEENVKKNRYKDILPFDHSRVKLTLKTPSQDSDYINANFIKGVYGPKAYVATQGPLANTVIDFWRMIWEYNVVIIVMACREFEMGRKKCERYWPLYGEDPITFAPFKISCEDEQARTDYFIRTLLLEFQNESRRLYQFHYVNWPDHDVPSSFDSILDMISLMRKYQEHEDVPICIHCSAGCGRTGAICAIDYTWNLLKAGKIPEEFNVFNLIQEMRTQRHSAVQTKEQYELVHRAIAQLFEKQLQLYEIHGAQKIADGVNEINTENMISSIEPEKQDSPPPKPPRTRSCLVEGDAKEEILQPPEPHPVPPILTPSPPSAFPTVTTVWQDNDRYHPKPVLHMVSSEQHSADLNRNYSKSTELPGKNESTIEQIDKKLERNLSFEIKKVPLQEGPKSFDGNTLLNRGHAIKIKSASPCIADKISKPQELSSDLNVGDTSQNSCVDCSVTQSNKVSVTPPEESQNSDTPPRPDRLPLDEKGHVTWSFHGPENAIPIPDLSEGNSSDINYQTRKTVSLTPSPTTQVETPDLVDHDNTSPLFRTPLSFTNPLHSDDSDSDERNSDGAVTQNKTNISTASATVSAATSTESISTRKVLPMSIARHNIAGTTHSGAEKDVDVSEDSPPPLPERTPESFVLASEHNTPVRSEWSELQSQERSEQKKSEGLITSENEKCDHPAGGIHYEMCIECPPTFSDKREQISENPTEATDIGFGNRCGKPKGPRDPPSEWT

SEQ ID NO: 1962 - DNA, 1040 bp, Homo sapien
cgacgagccatggttgctgggagcgacgcggggcgggccctgggggtcctcagcgtggtctgcctgctgcactgctttggtttcatcagctgtttttcccaacaaatatatggtgttgtgtatgggaatgtaactttccatgtaccaagcaatgtgcctttaaaagaggtcctatggaaaaaacaaaaggataaagttgcagaactggaaaattctgaattcagagctttctcatcttttaaaaatagggtttatttagacactgtgtcaggtagcctcactatctacaacttaacatcatcagatgaagatgagtatgaaatggaatcgccaaatattactgataccatgaagttctttctttatgtgcttgagtctcttccatctcccacactaacttgtgcattgactaatggaagcattgaagtccaatgcatgataccagagcattacaacagccatcgaggacttataatgtactcatgggattgtcctatggagcaatgtaaacgtaactcaaccagtatatattttaagatggaaaatgatcttccacaaaaaatacagtgtactcttagcaatccattatttaatacaacatcatcaatcattttgacaacctgtatcccaagcagcggtcattcaagacacagatatgcacttatacccataccattagcagtaattacaacatgtattgtgctgtatatgaatggtattctgaaatgtgacagaaaaccagacagaaccaactccaattgattggtaacagaagatgaagacaacagcataactaaattattttaaaaactaaaaagccatctgatttctcatttgagtattacaatttttgaacaactgttggaaatgtaacttgaagcagctgctttaagaagaaatacccactaacaaagaacaagcattagttttggctgtcatcaacttattatatgactaggtgcttgctttttttgtcagtaaattgtttttactgatgatgtagatacttttgtaaataaatgtaaatatgtacacaagtg

SEQ ID NO: 1963 - protein, 250 aa, Homo sapien
MVAGSDAGRALGVLSVVCLLHCFGFISCFSQQIYGVVYGNVTFHVPSNVPLKEVLWKKQKDKVAELENSEFRAFSSFKNRVYLDTVSGSLTIYNLTSSDEDEYEMESPNITDTMKFFLYVLESLPSPTLTCALTNGSIEVQCMIPEHYNSHRGLIMYSWDCPMEQCKRNSTSIYFKMENDLPQKIQCTLSNPLFNTTSSIILTTCIPSSGHSRHRYALIPIPLAVITTCIVLYMNGILKCDRKPDRTNSN

SEQ ID NO: 1964 - DNA, 9517 bp, Homo sapien
gttgctgtcggagagagaaagccgcacccgagaggaggtgtgggtgttccgcttccatcctaacggaacgagctccctcttcgcggacatgggattacccagcggctgctaacccctctcctcgccctgctcccccaaaccggcgtggctccccgggcaccaaggagctgactacagaggagcaggatttgcacccctcgctgggcttgctttggcaacagagtgcctgacccaggtcaggattttcaagaaagacatgtctgacaaaatgtctagcttcctacatattggagacatttgttctctgtacgcggagggatcgacaaatggatttattagcaccttgggcctggttgatgatcgttgtgttgtacagccagaaaccggggaccttaacaatccacctaagaaattcagagactgcctctttaagctatgtcccatgaaccgctactctgcccaaaagcagttctggaaagccgctaagcctggggccaacagcaccacagacgcagtgctactcaacaaactgcaccacgctgcagacttggaaaagaagcagaatgagacagaaaacaggaaattgctggggaccgtaatccagtatggcaatgtgatccagctcctgcatttgaaaagtaataaatacctaacagtgaataagaggcttcctgctctgttggagaagaatgccatgagagtcacattggacgaggctggaaatgaagggtcctggttttatattcagccattctacaagctgcgatccattggagacagcgtggtcataggtgacaaggtggttctgaaccccgtcaatgctggtcagcccctacatgctagcagccatcaactggtagataacccaggctgcaatgaggtcaattccgtcaactgcaatacaagctggaaaatagtccttttcatgaaatggagtgataacaaagacgacatattaaaggggggtgacgtggtgaggctgtttcatgctgagcaggagaagtttctcacctgtgacgaacacaggaagaagcagcacgtcttcctgagaaccacgggccggcagtcggccacatctgccaccagttcaaaagccctgtgggaggtggaggtggtccagcatgacccatgtcggggcggagcagggtattggaacagccttttccgtttcaagcatctggccacggggcattacttggcagcagaggtggaccctgatcaggacgcctctcgaagtaggttgcggaatgcccaagaaaagatggtatactccctggtctctgtgcctgaaggcaatgacatctcctccattttcgagctagatcccaccactctgcgtggaggtgacagccttgtcccaaggaactcttatgttcggctcagacacctatgtactaatacctgggttcacagcacaaatattcctattgacaaggaagaagaaaagcccgtgatgctgaaaattggcacctctcctgtgaaggaggataaggaagcatttgccatagttccggtttctcctgctgaagttcgggacctggactttgccaatgatgccagcaaggtgctgggctccattgctgggaagctagagaagggcaccatcacccagaatgaaaggaggtctgtaaccaagctgctagaagatttggtttacttcgtcactggtggaactaattctggtcaagatgttctcgaagttgtcttctccaagcccaacagagaacggcagaaactgatgagagaacagaatattctcaagcagatcttcaagttgttacaagccccattcacagactgcggtgatggcccaatgcttcggctggaagagctcggggaccagcggcacgctcctttcagacacatctgccggctctgctacagggtgctgagacactcgcagcaagactacaggaagaaccaggagtatatagccaagcagtttggcttcatgcagaagcagattggctatgatgtgttggctgaagacactatcactgccctgctccacaataatcggaaactcctggaaaaacacattaccgcggcagagattgacacatttgtcagcctggtgcgaaagaacagggagcccagattcttagattacctctccgacctctgtgtctccatgaacaaatcaattccagtgacccaggaactgatatgtaaagctgtgctgaaccccaccaacgctgacatcctgattgagaccaaattggttctttctcgttttgaatttgaaggtgtctcttccactggagagaatgctctggaggcaggagaagacgaggaagaggtgtggctgttttggagggacagcaacaaagagattcgcagcaagagtgtgagggaattggctcaggatgctaaagaagggcagaaggaggaccgagacgttctcagctactacagatatcagctgaacctctttgcgaggatgtgtctggaccgccaatacctggccatcaacgaaatctcaggccagctggatgtcgatctcattctccgctgcatgtctgacgagaacctgccctatgacctcagggcgtccttctgccgcctcatgcttcacatgcatgtggaccgagatccccaggaacaagtcacccccgtgaaatatgcccgcctctggtcggagattccctcggagatcgccattgacgactatgatagtagtggagcttccaaagatgaaattaaggagagatttgctcagaccatggagtttgtggaggagtatttaagagatgtggtttgtcagaggttccctttctctgataaagagaagaataagcttacgtttgaggttgtaaatttagctaggaatctcatatactttggtttctacaacttctctgaccttctccgattaactaagatccttctggccatattggactgtgtacatgtgacaacaatcttccccattagcaagatggcgaaaggagaagagaataaaggcagtaacgtgatgagatctattcatggcgtgggagagctgatgacccaggtggtgctccggggaggaggctttttgcccatgactcccatggctgctgcccctgaaggcaatgtgaagcaggcagagcctgagaaggaggacatcatggtcatggacaccaagctgaagatcattgagatactccagtttattttgaatgtgaggttggattataggatctcctgcctcctgtgtatatttaagcgagagtttgatgaaagcaattcccagacttcagaaacatcctccggaaacagcagccaagaagggccaagtaatgtaccaggtgctcttgactttgaacacattgaagaacaagcagaaggcatctttggaggaagtgaggagaacaccccactggacttggatgaccacggcggcagaacctttctccgtgtcctgctccacttgacgatgcatgactacccacccctggtgtcaggggccctgcagctcctcttccggcacttcagccagaggcaggaggtgctccaggccttcaaacaggttcaactgctggttaccagccaagatgtggacaactacaaacagatcaaacaagacttggatcaactgaggtccatcgtggaaaagtcagagctttgggtgtacaaagggcagggccccgatgagactatggatggtgcatctggagaaaatgaacataagaaaacggaggagggaaataacaagccacaaaagcatgaaagcaccagcagctacaactacagagtggtcaaagagattttgattcggcttagcaaactctgtgttcaagagagtgcctcagtgagaaagagcaggaagcagcaacagcgtctgctccggaacatgggcgcgcacgccgtggtgctggagctgctgcagattccctatgagaaggccgaagataccaagatgcaagagataatgaggttggctcatgaatttttgcagaatttctgcgcaggcaaccagcagaatcaagctttgctacataaacacataaacctgtttctcaacccagggatcctggaggcagtaaccatgcagcacatcttcatgaacaatttccagctttgcagtgagatcaacgagagagttgttcagcacttcgttcactgcatagagactcacggtcggaatgtccagtatataaagttcttacagacaattgtcaaggcagaagggaaatttattaaaaaatgccaagacatggttatggccgagctggtcaattcgggagaggatgtcctcgtgttctacaacgacagagcctctttccagactctgatccagatgatgcggtcagaacgggatcggatggatgagaacagccctctcatgtaccacatccacttggtcgagctcctggctgtgtgcacggagggtaagaatgtctacacagagatcaagtgcaactccctgctcccgctggatgacatcgttcgcgtggtgacccacgaggactgcatccctgaggttaaaattgcatacattaacttcctgaatcactgctatgtggatacagaggtggaaatgaaggagatttataccagcaatcacatgtggaaattgtttgagaatttccttgtagacatctgcagggcctgtaacaacactagtgacaggaaacatgcagactcgattttggagaagtatgtcaccgaaatcgtcatgagtattgttactactttcttcagctctcccttctcagaccagagtacgactttgcagactcgccagcctgtctttgtgcaactgctgcaaggcgtgttcagggtttaccactgcaactggttaatgccaagccaaaaagcctccgtggagagctgtattcgggtgctgtctgatgtagccaagagccgggccattgccattcccgtggacctggacagccaagtcaacaacctctttctcaagtcccacagcattgtgcagaaaacagccatgaactggcggctctcagcccgcaatgccgcacgcagggactctgttctggcagcttccagagactaccggaatatcattgagagattgcaggacatcgtctccgcgctggaggaccgtctcaggcccctggtgcaggcagagttatctgtgctcgtggatgttctccacagacccgagctgcttttcccagagaacacagacgccagaaggaaatgtgaaagtggcggtttcatttgcaagttaataaagcatacaaaacagctgctagaagaaaatgaagagaagctctgcattaaggtcctacagaccctgagggaaatgatgaccaaagatagaggctatggagaaaagggtgaggcgctcaggcaagttctggtcaaccgttactatggaaacgtcagaccttcgggacgaagagagagccttaccagctttggcaatggcccactgtcagcaggaggacccggcaagcccgggggaggagggggaggttccggatccagctctatgagcaggggtgagatgagtctggccgaggttcagtgtcaccttgacaaggagggggcttccaatctagttatcgacctcatcatgaacgcatccagtgaccgagtgttccatgaaagcattctcctggccattgcccttctggaaggaggcaacaccaccatccagcactcctttttctgtcgcttgacagaagataagaagtcagagaaattctttaaggtgttttatgaccggatgaaggtggcccagcaagaaatcaaagcaacagtgacagtgaacaccagtgacttgggaaataaaaagaaagacgatgaggtagacagggatgccccatcacggaaaaaagctaaagagcccacaacacagataacagaagaggtccgggatcagctcctggaggcctccgctgccaccaggaaagccttcaccactttcaggagggaggctgatcccgacgaccactaccagcctggagagggcacccaggccactgccgacaaggccaaggacgacctggagatgagcgcggtcatcaccatcatgcagcccatcctccgcttccttcagctcctgtgtgaaaaccacaaccgagacctgcagaacttcctccgttgccaaaataacaagaccaactacaatttggtatgtgagaccctgcagtttctggactgtatttgtggaagcacaactggaggccttggtcttctgggcttgtatataaatgaaaagaacgtagcgcttatcaaccaaaccctggaaagtctgaccgaatactgtcaaggaccttgccatgagaaccagaactgcatagccacccatgaatccaatggcattgacatcatcacagccctgatcctcaatgatatcaatcctttgggaaagaagaggatggaccttgtgttagaactgaagaacaatgcctcgaagttgctcctggccatcatggaaagcaggcacgacagtgaaaacgcagagaggatactttataacatgaggcccaaggaactggtggaagtgatcaagaaagcctacatgcaaggtgaagtggaatttgaggatggagaaaacggtgaggatggggcggcgtcccccaggaacgtggggcacaacatctacatattagcccatcagttggctcggcataacaaagaacttcagagcatgctgaaacctggtggccaagtggacggagatgaagccctggagttttatgccaagcacacggcgcagatagagattgtcagattagaccgaacaatggaacagatagtctttcccgtgcccagcatatgtgaattcctaaccaaggagtcaaaactacgaatttactatactacagagagagacgaacaaggcagcaaaatcaatgatttctttctgcggtctgaagacctcttcaatgaaatgaattggcagaagaaactgagagcccagcccgtgttgtactggtgtgcccgcaacatgtctttctggagcagcatttcgtttaacctggccgtcctgatgaacctgctggtggcgtttttctacccgtttaagggagtccgaggaggaaccctggagccccactggtcgggactcctgtggacagccatgctcatctctctggccatcgtcattgccctccccaagccccatggcatccgggccttaattgcctccacaattctacgactgatattttcagtcgggttacaacccacgttgtttcttctgggcgctttcaatgtatgcaataaaatcatctttctaatgagctttgtgggcaactgtgggacattcacaagaggctaccgagccatggttctggatgttgagttcctctatcatttgttgtatctggtgatctgtgccatggggctctttgtccatgaattcttctacagtctgctgctttttgatttagtgtacagagaagagactttgcttaatgtcattaaaagtgtcactcgcaatggacggtccatcatcctgacagcagttctggctctgatcctcgtttacctgttctcaatagtgggctatcttttcttcaaggatgactttatcttggaagtagataggctgcccaatgaaacagctgttccagaaaccggcgagagtttggcaagcgagttcctgttctccgatgtgtgtagggtggagagtggggagaactgctcctctcctgcacccagagaagagctggtccctgcagaagagacggaacaggataaagagcacacatgtgagacgctgctgatgtgcattgtcaccgtgctgagtcacgggctgcggagcgggggtggagtaggagatgtactcaggaaaccgtccaaagaggaacccctgtttgctgctagagttatttatgacctcttgttcttcttcatggtcatcatcattgttcttaacctgatttttggggttatcattgacacttttgctgacctgaggagtgagaagcagaagaaggaagagatcttgaagaccacgtgctttatctgtggcttggaaagagacaagtttgacaacaagactgtcacctttgaagagcacatcaaggaagaacacaacatgtggcactatctgtgcttcatcgtcctggtgaaagtaaaggactccaccgaatatactgggcctgagagttacgtggcagaaatgatcaaggaaagaaaccttgactggttccccaggatgagagccatgtcattggtcagcagtgattctgaaggagaacagaatgagctgagaaacctgcaggagaagctggagtccaccatgaaacttgtcacgaacctttctggccagctgtcggaattaaaggatcagatgacagaacaaaggaagcagaaacaaagaattggtcttctaggacatcctcctcacatgaatgtcaacccacaacaaccagcataagcaaatgaaagaaaggaattgtatttaccttttataattattattagtgtgggtatggctaatgagttctgattcacccacgaaggttacatttatgctgaatacatttgtaaatactcagttttatactgtatgtatatgattgctactctaaaggtttggatatatgtattgtaattagaattgttggcatgatgacatttcatttgtgccaaaaatattaaaaatgccttttttggaaggactaacagaaagcacctgatttgcacttgaaccagattatagatttaaaagtatatgacatgtattttgtatttaaaactagaatagccagtatttatgttttttataaaactgtgcaatacgaattatgcaatcacaatacatttgtagctcccgagtgtcctaaagggagtgcacttctttgaagctggtgtgttaatactatgtaataaatggttaactttcaaatgatgctgctgccaaaattatattaatagtgagtttcaggcccctgggcattttgtaccatgtaattatcctctggtgatgctgtttctcgttagtggcagtagtgcctccgtctcctagtgataatgctccaagtctatgaactgttaaatcagcattcattttaagaaaagcaactttagtttcaaagatacttttaagcttctaaattgatcatttaaactatttctttaaataagagagccaaattagaggctcatactttagcttgtgaagaagataatgaattttttaaagggaactttctatgcaatgttcaggataaatcgatactgctggccaatcagtgtcatctcctgggtaaattttgatgtcgcattataaagacatgcataattgatggtttctagattatctagtccaaacaatagagtttattttttcttcatctgaaccaacatgctacagtagctaagaagtattaaaactatatacatccatataaagatgaaatatgaactatctcattagaagtcatagttgaccacagacatgttattcttctgaaagagccacattttggttttatttcttgtcacatgatttcttttcttgatggatgaaaaatatgaaatgaaatcttttatatctgttgcctagttttgtacatggatctcattttacaagagaatctctctgcta

SEQ ID NO: 1965 - protein, 2000 aa, Homo sapien
MSDKMSSFLHIGDICSLYAEGSTNGFISTLGLVDDRCVVQPETGDLNNPPKKFRDCLFKLCPMNRYSAQKQFWKAAKPGANSTTDAVLLNKLHHAADLEKKQNETENRKLLGTVIQYGNVIQLLHLKSNKYLTVNKRLPALLEKNAMRVTLDEAGNEGSWFYIQPFYKLRSIGDSVVIGDKVVLNPVNAGQPLHASSHQLVDNPGCNEVNSVNCNTSWKIVLFMKWSDNKDDILKGGDVVRLFHAEQEKFLTCDEHRKKQHVFLRTTGRQSATSATSSKALWEVEVVQHDPCRGGAGYWNSLFRFKHLATGHYLAAEVDPDQDASRSRLRNAQEKMVYSLVSVPEGNDISSIFELDPTTLRGGDSLVPRNSYVRLRHLCTNTWVHSTNIPIDKEEEKPVMLKIGTSPVKEDKEAFAIVPVSPAEVRDLDFANDASKVLGSIAGKLEKGTITQNERRSVTKLLEDLVYFVTGGTNSGQDVLEVVFSKPNRERQKLMREQNILKQIFKLLQAPFTDCGDGPMLRLEELGDQRHAPFRHICRLCYRVLRHSQQDYRKNQEYIAKQFGFMQKQIGYDVLAEDTITALLHNNRKLLEKHITAAEIDTFVSLVRKNREPRFLDYLSDLCVSMNKSIPVTQELICKAVLNPTNADILIETKLVLSRFEFEGVSSTGENALEAGEDEEEVWLFWRDSNKEIRSKSVRELAQDAKEGQKEDRDVLSYYRYQLNLFARMCLDRQYLAINEISGQLDVDLILRCMSDENLPYDLRASFCRLMLHMHVDRDPQEQVTPVKYARLWSEIPSEIAIDDYDSSGASKDEIKERFAQTMEFVEEYLRDVVCQRFPFSDKEKNKLTFEVVNLARNLIYFGFYNFSDLLRLTKILLAILDCVHVTTIFPISKMAKGEENKGSNVMRSIHGVGELMTQVVLRGGGFLPMTPMAAAPEGNVKQAEPEKEDIMVMDTKLKIIEILQFILNVRLDYRISCLLCIFKREFDESNSQTSETSSGNSSQEGPSNVPGALDFEHIEEQAEGIFGGSEENTPLDLDDHGGRTFLRVLLHLTMHDYPPLVSGALQLLFRHFSQRQEVLQAFKQVQLLVTSQDVDNYKQIKQDLDQLRSIVEKSELWVYKGQGPDETMDGASGENEHKKTEEGNNKPQKHESTSSYNYRVVKEILIRLSKLCVQESASVRKSRKQQQRLLRNMGAHAVVLELLQIPYEKAEDTKMQEIMRLAHEFLQNFCAGNQQNQALLHKHINLFLNPGILEAVTMQHIFMNNFQLCSEINERVVQHFVHCIETHGRNVQYIKFLQTIVKAEGKFIKKCQDMVMAELVNSGEDVLVFYNDRASFQTLIQMMRSERDRMDENSPLMYHIHLVELLAVCTEGKNVYTEIKCNSLLPLDDIVRVVTHEDCIPEVKIAYINFLNHCYVDTEVEMKEIYTSNHMWKLFENFLVDICRACNNTSDRKHADSILEKYVTEIVMSIVTTFFSSPFSDQSTTLQTRQPVFVQLLQGVFRVYHCNWLMPSQKASVESCIRVLSDVAKSRAIAIPVDLDSQVNNLFLKSHSIVQKTAMNWRLSARNAARRDSVLAASRDYRNIIERLQDIVSALEDRLRPLVQAELSVLVDVLHRPELLFPENTDARRKCESGGFICKLIKHTKQLLEENEEKLCIKVLQTLREMMTKDRGYGEKGEALRQVLVNRYYGNVRPSGRRESLTSFGNGPLSAGGPGKPGGGGGGSGSSSMSRGEMSLAEVQCHLDKEGASNLVIDLIMNASSDRVFHESILLAIALLEGGNTTIQHSFFCRLTEDKKSEKFFKVFYDRMKVAQQEIKATVTVNTSDLGNKKKDDEVDRDAPSRKKAKEPTTQITEEVRDQLLEASAATRKAFTTFRREADPDDHYQPGEGTQATADKAKDDLEMSAVITIMQPILRFLQLLCENHNRDLQNFLRCQNNKTNYNLVCETLQFLDCICGSTTGGLGLLGLYINEKNVALINQTLESLTEYCQGPCHENQNCI

SEQ ID NO: 1966 - DNA, 2754 bp, Homo sapien
gcggccgcctcctcttcggggtcattaaagccaatgagccgcgcgcctctgccgagcgcagccaactaaatcggcttggatgattcgcgacctgagcaagatgtacccgcagaccagacacccggcaccgcatcagcctgctcaaccctttaaatttacaatttccgaatcctgtgatcggattaaggaagagtttcagtttttacaggctcaataccacagtctgaagctggaatgtgagaaactcgccagtgagaagacagagatgcagcggcattatgtcatgtattatgaaatgtcctatgggttgaatatagaaatgcacaagcaggcagagattgtcaagaggctgaatgctatctgtgcacaagtcattcctttcctgtcccaagagcaccagcaacaagtggtgcaggctgtggaacgggccaagcaggtgaccatggcagaactgaacgccatcattgggcaacaactccaggcccagcatttatcacatggacatggtctccccgtacctctgactccacacccttcagggctccagccccctgccattccacccatcggtagcagtgccgggcttctggccctctccagtgctctaggaggtcagtcccatcttccaattaaagatgagaagaagcaccatgacaatgatcaccaaagagacagagactccatcaagagctcttcagtatccccatcagccagtttccgaggtgctgagaagcacagaaactccgcagactactcctcagagagcaaaaagcagaaaactgaagaaaaggaaattgcagctcgttatgacagcgatggtgagaaaagtgatgacaacttggtggttgacgtttccaatgaggatccatcttcccctcgagggagcccagcacattcccccagagagaatggcctagacaagacacgcctgctcaagaaagatgccccgattagtccagcctctattgcatcttccagcagtactccctcctccaaatccaaagaacttagccttaatgaaaaatctactactcccgtctcaaagtccaatacccctactccacgaactgatgcgcccaccccaggcagtaactctactcccggattgaggcctgtacctggaaaaccaccaggagttgaccctttggcctcaagcctaaggaccccaatggcagtaccttgtccatatccaactccatttgggattgtgccccatgctggaatgaacggagagctgaccagccccggagcggcctacgctgggctccacaacatctcccctcagatgagcgcagctgctgccgccgccgctgctgctgctgcctatgggagatcaccagtggtgggatttgatccacaccatcacatgcgtgtgccagcaatacctccaaacctgacaggcattccaggaggaaaaccagcatactccttccatgttagcgcagatggtcagatgcagcctgtcccttttccacccgacgccctcatcggacctggaatcccccggcatgctcgccagatcaacaccctcaaccacggggaggtggtgtgcgcggtgaccatcagcaaccccacgagacacgtgtacacgggtgggaagggctgcgtcaaggtctgggacatcagccacccaggcaataagagtcctgtctcccagctcgactgtctgaacagggataactacatccgttcctgcagattgctccctgatggtcgcaccctaattgttggaggggaagccagtactttgtccatttgggacctggcggctccaaccccacgcatcaaggcagagctgacatcctcggcccccgcctgctatgccctggccatcagccccgattccaaggtctgcttctcatgctgcagcgacggcaacatcgctgtgtgggatctgcacaaccagaccttggtgaggcaattccagggccacacagatggagccagctgtattgacatttctaatgatggcaccaagctctggacaggtggtttggacaacacggtcaggtcctgggacctgcgcgaggggcggcagctgcagcagcacgacttcacctcccagatcttttctctgggctactgcccaactggagagtggcttgcagtggggatggagaacagcaatgtggaagttttgcatgtcaccaagccagacaaataccaactacatcttcatgagagctgtgtgctgtcgctcaagtttgcccattgtggcaaatggtttgtaagcactggaaaggacaaccttctgaatgcctggagaacaccttatggggccagtatattccagtccaaagaatcctcatcggtgcttagctgtgacatctccgtggacgacaaatacattgtcactggctctggggataagaaggccacagtttatgaagttatttattaaagacaaatcttcatgcagactggacttctcctcctggtagcactttgctctgtcatcctttttgttcacccccatccccgcatctaaaaccaaggatttcagatactcattgcagttgtggagtttaatcccctttcttaacctcacttcccacttgctattgaattgtgaatagtcattaaaaacctgtgataccaaatcttcagctgtctacttggaagaacatggaataagcatacttaacagtgaaaagaatctttaattatgtattatatctgtaatatatttattttgtttaaagaaggctttctaacaatgactgactaaataaagctgtctgctcctgcattgat

SEQ ID NO: 1967 - protein, 787 aa, Homo sapien
AARLCRAQPTKSAWMIRDLSKMYPQTRHPAPHQPAQPFKFTISESCDRIKEEFQFLQAQYHSLKLECEKLASEKTEMQRHYVMYYEMSYGLNIEMHKQAEIVKRLNAICAQVIPFLSQEHQQQVVQAVERAKQVTMAELNAIIGQQLQAQHLSHGHGLPVPLTPHPSGLQPPAIPPIGSSAGLLALSSALGGQSHLPIKDEKKHHDNDHQRDRDSIKSSSVSPSASFRGAEKHRNSADYSSESKKQKTEEKEIAARYDSDGEKSDDNLVVDVSNEDPSSPRGSPAHSPRENGLDKTRLLKKDAPISPASIASSSSTPSSKSKELSLNEKSTTPVSKSNTPTPRTDAPTPGSNSTPGLRPVPGKPPGVDPLASSLRTPMAVPCPYPTPFGIVPHAGMNGELTSPGAAYAGLHNISPQMSAAAAAAAAAAAYGRSPVVGFDPHHHMRVPAIPPNLTGIPGGKPAYSFHVSADGQMQPVPFPPDALIGPGIPRHARQINTLNHGEVVCAVTISNPTRHVYTGGKGCVKVWDISHPGNKSPVSQLDCLNRDNYIRSCRLLPDGRTLIVGGEASTLSIWDLAAPTPRIKAELTSSAPACYALAISPDSKVCFSCCSDGNIAVWDLHNQTLVRQFQGHTDGASCIDISNDGTKLWTGGLDNTVRSWDLREGRQLQQHDFTSQIFSLGYCPTGEWLAVGMENSNVEVLHVTKPDKYQLHLHESCVLSLKFAHCGKWFVSTGKDNLLNAWRTPYGASIFQSKESSSVLSCDISVDDKYIVTGSGDKKATVYEVIY

SEQ ID NO: 1968 - DNA, 4134 bp, Homo sapien
gccggaagctggcgtactccggcagcgaaagcggtgcagacgggaggaaggcagctgagcctgaggtggaggtggaggtgtaccggcgggactccaagaagctgccaggcctgggagaccctgacatcgactgggaggagagcgtctgcctgaatctcatcctgcagaagctggactacatggtgacctgtgcggtgtgcacacgtgctgacggcggggacattcacatccataagaagaaatctcagcaagtgttcgcgtcccccagtaaacaccccatggacagcaagggggaggagtccaagatcagctaccccaacatcttcttcatgattgacagcttcgaggaggtgttcagcgacatgaccgtaggggaaggagagatggtctgtgtggagctggtggctagtgacaaaaccaacacgttccagggggtcatctttcagggctccatccgctacgaggcgctcaagaaggtgtatgacaaccgggtgagcgtggccgcccgcatggcacagaagatgtcgtttggcttctacaagtacagcaacatggagtttgtgcgcatgaagggcccccagggcaagggccacgccgagatggcggtcagccgagtgtctacaggtgacacatccccctgtgggactgaagaggactccagcccagcttcgcccatgcacgagcgggtgacctccttcagcacaccccccaccccagaacggaacaaccggcctgccttcttctccccatccctcaagaggaaggtgccccggaaccggatcgctgagatgaagaagtcgcactcggccaacgacagcgaggagttcttccgggaggacgacggtggagccgatctgcacaatgcaaccaacctgcggtctcggtccctgtcgggcacaggacggtccctggtcgggtcctggctgaagctgaacagagcagatggaaacttccttctctatgcacacttaacctacgtcacgttgccgctgcatcggattttaacagacatcctggaagttcggcagaagcccatcctgatgacctagccgcgtgcggagcctgcgcagagccccggccgggcccagccctcggagtgctgccaagtgcctacctgtccaccgccaccggggtctgcgatggcacgccagtgctggagccgcagccaggcgaggccactcgactcccggggccggggccgactccacgaacaccagcccaaactgaagtgcctcttccctcccctgctggcgctgctccgccctgtgccccccgcccatcgccccccacccatctctggagagccctctgcacccaaagaggactagagatgccgagcggccatgagagagagcggaaggagcagctgatgcccagagcggggccagagcggcgggtctatgttcacgtccccccagcagcaggcggaaccacccagccagggcactcagtgcattggactgtccacatgttcttgaggaaagccggtggaagattctggaatgccgtgcggatgaacttcagcgcccgagtcagtcccagctcatcctccccagtttaccactttgttctaataggagatgggaacacgagaagtttgatggctttgccctgggctgggaatacctcacccacgcccagttccagaaaggcctccagctgagcagacggccccgatcccgccagaacggccttttgcttccagccaaagaacaccgccaacacgcacacctccaacctgggacatcccacgctgggcctcgcacggaggaacctgcagaatttggattctgagggtagtcgggaggcctcggtagccaggcagaacaggatatctgccaaagggtgtctgatgtggggtggggctggcatcctcccaggaaggttctaggtgggaccccgtcttctgggggcgggggtgtcttttcatcttccctggtttcctagaactcacttcctttgacggcgtgtgttggtcccatctctcagaccagctcactgaggcagaggagttgctcagaggctcacatgggcacccccattggttcgtgtgagcagctgcccagccccaggcctgccctcggcctggtccagcatgaaggcgtttccatctgcaaggatgcacggtaccctccccgagagcaggcctgtcccctacccaactgggaataaactggaagctgggtctctttgttgctatgtttttttgtttgaagttcccaggaatatttgaggggttccggtgatgtgtttagggatcttctctgtgggggaaaaggaagaggagggtcttgttctcccatctgtttattctttgggctctgggaacaggggactactttggggctttctccagacttttgtatgttgttattaaaagcgagctattgcatttcattctgcctcagtttgcccacctgtgaaatggggctgataccacctacctcactgaagtcccagggttcaagtgtgtggctgggtcagggcgtggtcacccgtcattctgcataggtcgggttggatgttagactcctgggatgccctcctcccccctcgccctttgtaataacctaatctgagaccgtgcttggtggggggatgtgaactttctctctcccccagcagtgtctgctcaggcctgacagctcagctctgcacgatttcatgttcctaaacccatgtcttagggcagcacagagccaggtcatgtcatgccccaaagtgtggggacagagcctcagggagccccgagcatggtccagccccatttgagtgctctccggggatgccaaatgctgcttccaagtttgagtccatgtggctaaaatacacccatttcttcaggaactcttcccctggttgttctggggatcttgggagaaacacagccctgacagctcgtccgtgggaagatgaggcagtccaggttgtgaggagcacagcggcccgccctctgttctcagaggtgaggggcgggagaaggttgtctcctctggggccagcatttggccaagctcggaggcttggccagcactgctggatggctcagagcaagctgggctccccgtctgtaagatggcaaaaatgctgcccccctcacagggtgaccatgaggaccagtcacagtgatgtgtgaaagggctcgctggtcacagaaacgtgtacaaatcatgctattttagagatcagccctcaatttgtaaggcatgtgaacagggcacgcggtgggctggtggtttcatagccgacacacagcgcctaccatgtgcagctgcctgtccgaccccatcttacagacgagaaaaccagcacacaggcaccaaggaactgtccggaactaacagcaggggccggcgatgggagtcaaacccaggcacgcggcctggcctgcatgctgagccacatggtgctgtccggacagatggacagacactcggtggagtctgcctttctcaggccctaaatccctctccaaagggtacttgcgatgccggatttaaaacttgctcagagccacttagccacttgagaaccagacagtaaggtgttactcccaggtttgtttttccaaagtaacagatgacatgtggaataaagtaatagagtaacaagtggcagggccagaaccagggtccccaaagtcctggtgttggcacatttgtacttcttgtaagaccatctttaatttttctgggaacacacctgccttttgtgtaatgcggggaagactaatgcatggtgacacctggttttcctcaacaggacacttgatcccaaaacccctttaagaccttaggtttcctcagcggaaaactgtactttaatcccaaaccccctttaagacatattggggctgggcgcagtggctcacgcctgtaatcccagcactttgggaggctgagatgggtggatcacctgagatcaggagttcaagaccagcctgactaacatgctgaaaccccatgtctactaaagatagaaaaattagccggacatggtggcaggcacctgtaatcccagctactcggaaggctgaggaaggagaatcacttgaacctagtaggcagaggttgcagtgagccgagatcacgccattgcattctagcctgggcaacgagagcgaaactctgtctc

SEQ ID NO: 1969 - protein, 348 aa, Homo sapien
RKLAYSGSESGADGRKAAEPEVEVEVYRRDSKKLPGLGDPDIDWEESVCLNLILQKLDYMVTCAVCTRADGGDIHIHKKKSQQVFASPSKHPMDSKGEESKISYPNIFFMIDSFEEVFSDMTVGEGEMVCVELVASDKTNTFQGVIFQGSIRYEALKKVYDNRVSVAARMAQKMSFGFYKYSNMEFVRMKGPQGKGHAEMAVSRVSTGDTSPCGTEEDSSPASPMHERVTSFSTPPTPERNNRPAFFSPSLKRKVPRNRIAEMKKSHSANDSEEFFREDDGGADLHNATNLRSRSLSGTGRSLVGSWLKLNRADGNFLLYAHLTYVTLPLHRILTDILEVRQKPILMT

SEQ ID NO: 1970 - DNA, 4745 bp, Homo sapien
  Unsure 3587: Unknown base
  Unsure 4738: Unknown base
acctcattccaggagctccctctctggcaccaagctccctggggtgagttttctttttgaagagtccaggagaacaggtaagcagtggggaagcagggagtccatttcagggacaggaattcccggatgaaaagtgaaaggagagggacggggcccaagctgagggtttcttcctggtttctcggacagctcctggaccaagactcagggaacattgagacagagcgtttgtcacaggaggagcggggtcagggcgaagtcccagagccccaggcatggctctcagggtctcaggccccgaaggcggtgcatgggctggggaggtgcagcattggggattccccatctccgcagagtttctcttctccctctcccagcctgcgacgggtccttcttcctggacactcacgacgcggacccagttctcactcccactgagtgtcgggtttctagggaagccaatcagcgtcgcgcggccccggttctaaagtccccacgcaccaccgggactcggagtctccccagacgccgacgatggggtcatggcgccccgaaccctcctcctgctgctctcgggaccctgccctggccgagacctgggcgggtgagtgcggggtcaggagggaaacggcctctgccgtgaggagcgaaaggtccacctggctggggcgcaggacccggggagccgcgccgggaggagggtcgggcgggtctcagcccctcctcgcccccaggctcccactccatgaggtatttcagcaccgccgtttcctggccgggccgcggggagcccagcttcattgccgtgggctacgtggacgacacgcagttcgtgcgggtcgacagtgacgccgtgagtctgaggatgaagacgcgggcgcggtgggtggagcaggaggggccggagtattgggacctacagacactgggcgccaaggcccaggcacagactgaccgagtgaacctgcggaccctgctccgctactacaaccagagcgaggcgggtgagtgaccccggcccggggcgcagatcacttactccccgctccatgcctcacggacggccctggtcccctgagtctccgggtccaagatcgaccccgaggctgcggacctgcagagatcctcgacccgggagagccccaggcgcctttacctggtttcatcttcagttgaggccaaaatctccgcaggttgctagggtccgggccagggctcggtgggcggggctgaccgcgggaactgggccagggtatcacatcctccagggaatgtttggctgcgacctggggcccgacgggcgtctcctccgcgggtatgagcagtatgcctacgacggcaaggattacatcgccctgaacgaggacctgcgctcctggaccgccgcggataccgcggctcagattacccagcgcaagtatgaggcggccaatgtggctgagcaaaggagagcctacctggagggcacctgcatggagtggctccgcagacacctggagaacgggaaggagacgctgcagcgcgcgggtaccaggggccatggggagcctgctcgatctcctgtagatctcccgggctggcctcgcacaaggaggggaagaaaatggaaacaccaccagaatatcgccctccctcctgtcctgacggagaggaatcctcctgggtttccagatcctgtatcagagattgactctgagggcccaccctgctcttcctgggacaattaagggatgaagtctctgagggagtggaggggaagacaatccctggaagactgatccgcggtcccctttcaccccacagcaaccttgggcaccaggacttttcctcccgggccttgttctctgcctcacactcaatgtgtcggagtctgactccagctcctctgagtcccttggcctccactcagatcaggaccagaagtccctgctaccctgctcagagactagaactttccaaggaataggagattatcccaggcgcctgtgtccaggctggtgtctgggctctgtgctcccttccccaccccaggtgtcctattcatcaggatggtcacatgggcgctgctggggtgtcccatgaggaatgcaaagtgcctgagttttccgactcttcctttcagaccccccccaagacacacgtgacccacccccctctctgaacatgaggcataacgaggtcctgggttctgggcttctaccctgcggagatcacattgacctggcagcgggatggggaggaccagacccaggacatggagctcgtggagaccaggcccacaggggatggaaccttccagaagtgggcggttgtggtagtgccttctggagaggaacagagatacacatgccatgtgcagcacaaggggcctgcccaagcccctcatcctgagatggggtaaggagagagatgggggcggccatgtctcttagggaaagcaggagcccctctggagacctttagcagggtcggggctgggtcctggaggtcagaaccctcacattcccctcctttcccagagccctctccccagcccaccatccccattgtgggtatcattgctggcctggttctccttggagctgtggtcactggagctgtggtcactgctgtgatgtggaggaagaagagctcaggtggggaaggggtgaggagtcgggtttgagttttcttgtcccactgggggtttcaagctccaggtagaaatgtgttctgcctggttaccgggaagcaccatccacattcatgggcctacccagcctgggccctgtgtgccagcacttactcttttgtaagcacctgtgacaatgaaggacagatttctcaccttgatgattgtagtgatggggatctgaccccagtaatcacaggtcaggggaaggtcctgctgaggacagaccttaggagggcagttggtcaggaccacatctgctttcttgttttctgatcctgcccttggtttgcagtcacacatttctggaaacttctcgaggttccaagactaggaggttcctctaggacctcatggccctgctaccttcctggcctctcacaggacgttttcttcccgcagatagaaaaggagggagctactctcaggctgcaagtaagtatgaaggaggctgatccctgagatccttgggatattgtggttgggagccatgggggagctcacccaccccacaattcctcctctagccacatctcctgtgggatctgaccaggttctgtttttgttctaccccaggcagccaaagtgcccagggctctgatgtgtctctcacggcttgtaaagctgagaccctggggaggctgatgtgtgtgggttgttggggtaacagtggatatagctgtgctatggggtttctttgacttggatgtattcagcacatgatgggctgttgaaggtgtgacccctcactgtgagtgatatgaatttgttcatgaatattttttctatagtgtgagacagctgccttgtgtgggactgagaggcaagatttgttcatgccttccctttgtgacttcaagaaccctgacttctctttctgcaaaggcatctgaatgtgtctgtgtccctataggcntaatgtgaggtggtggggagaccagcccacacccgtgtccaccatgaccctgttccccacactgacctacattccttccccgatcacctttcctgttccagagaagtggtgctgggatgtctccatctctgtctcaacttcatggtgcactgagctgtaacttcttacttccctattaaaattagaatctgagtataaatttacttttttcaaattatttccatgacgggttgatgggttaattaaaggagaagattcctaaaatttgagagacaaaataaatggaagacatgagaaccttccagagtccacgtgtttcttgtgctgatttgttgcaggggaggagagtagatggggctgtgcccagtgtgtgctcaggccaccatgggctttatgtggtcacagctcacctgggtcatctttgctgctccactgtccttggcccttcagtagaaccttgtcccaccaggacctgtgatcacagggacttggatgtcacctagggtggtccctacacatcgaagtccttccggtatgaagagacaaattttcagtcccctgtatcttttgccctccttccaggtctctttcctggattgtattttccatctttttccccagccttcttaaaggaagcagattctgaaatttgcagagaggaggggtcccatagtttctcatcgtaggtaactttctgttggaactcctcttctgctttcctactcttcttcctgcctgagttgtagtaatcccagtgctggctccaatccaaactcatgcatttataaagcagagtctgatttagatttatatggggttggaaaattggacccacaaggctaggattatctttcctgaacagaaaaatatggctgtgcgctgcagtgtgcaggagggttggtgtgggaggaggtgggaaggacacacaagcagccctggtgagaaaagcactggcagcactgatgttggtgtgagatgatgttgttctttagctacgttaataaagatattgcctttagaatacagaggtgctctacagtgatcattcattcaactgacatttgttgtctgctaggtatatgactgtttttgcatttagaaaacatcattaaagtaaaaacagaaaatttctggccttgtggtgtatacgnctagatg

SEQ ID NO: 1971 - DNA, 3887 bp, Homo sapien
aagacaggaacatggtgtttataagctgcccttaatggcagagaacacagacagaaacgagggaagagagagaaattggggaccctgaagaaagggggccagcagcaggtaggtgccatcagggacaagaacagcacctcccagggtgggagaccccaggcctttctggcagcaggtctggatggaaagtggacaggaggctcacccgtctgcatcccctgctcctgcccctgctcggctacaaaaaccaaagggacagcagctgaccacaccccggtagccactcctgcataaagctctcccctcctgtgaccagctgaggacctcaggctgcagcggagccatgcccagatacacggtgcacgtacgtggggaatggctggcagtgccctgccaggacgcgcagctcactgtgggctggctgggccgggaggccgtgaggcgctatatcaagaataagcccgacaatggtggcttcacctccgtggatgacgcgcacttccttgtgcgccggtgcaagggcctgggcctgctggacaacgaggaccggctcgaggtggccctagagaacaacgagttcgtggaagtggttatagagggtgatgccatgtctcctgacttcattccatctcaaccagaaggagtttatctatacagcaagtaccgggagcctgaaaagtacatcgagttagatggagaccgtctgaccacggaggatctggtcaacttgggaaagggacgctacaaaataaagctcaccccaactgctgagaagagggtgcagaaatccagggaggtcatagatagcatcataaaagagaaaacagttgtttacggtattactacaggttttgggaaatttgccagaactgtaattcctatcaataagctacaggagcttcaggtcaacttagtacgctcacattcttcaggtgttgggaaaccactaagtcctgagaggtgtcggatgctcttggctttaaggatcaatgtcttagccaaaggatacagtggcatttccctggagaccctcaaacaagtcatagaaatgtttaatgcctcctgcctgccctatgtcccagagaaaggaaccgttggtgccagtggagaccttgccccactctctcatcttgctcttgggctagttggagaagggaagatgtggtctccgaagagtggctgggctgatgctaaatacgtgctagaagcccatggattgaaaccagttattttaaaaccaaaagagggcctggcactcatcaatgggacgcagatgatcacatccctgggctgtgaagctgtagagcgagccagtgctattgcacggcaggctgacattgtggcagccctgacccttgaggtgctgaagggcaccaccaaagcctttgacactgacattcatgctcttcgacctcaccgtgggcaaattgaagttgcttttcggtttcggtcactcttggactcagatcaccacccatcagaaatagcagagagtcacaggttctgtgatcgcgtccaggatgcatacaccttgcgctgctgtccacaggtccatggtgtggtgaatgatacaatagcatttgtgaagaacatcattaccacagaactgaacagcgcaacagataatcctatggtctttgccaataggggagagacaatttctggaggaaacttccatggtgaatacccagccaaagccctagactacttggccattggcatccatgaacttgctgcaatcagtgagagaagaatcgagcggctctgcaatccctccctcagtgagctgcctgccttcctggtggctgaaggtggtctgaactctgggttcatgatagctcactgcacggcagcagcccttgtttctgagaacaaggctctgtgccatccctcgtctgttgactccctctccaccagcgcagccacggaggaccacgtctccatgggaggatgggcagcaaggaaagccctcagggtcatcgagcatgtggagcaagtgctggccatcgagctccttgcagcctgccagggcatagagtttctacgtcccctgaaaacaaccactccgctggagaaggtctatgacctggtgcgctctgttgtaaggccctggataaaagatcgcttcatggccccggacatcgaggcagcccacaggctgctcctggagcagaaggtttgggaagtagctgctccatacattgaaaaatacagaatggagcatattccagaatcaagacctctttctccaacagccttttcactgcaatttctgcacaagaaatccaccaaaatcccggagtctgaggacctttaatgggctttgtcatgaagtagcagatgagagggcagtcagtttagcacaaagcaatactaggctgaaggagagacctgagaactttcctaggtagatcaatccattgtatcattcagttcttctaaagcctacgttggttaggctgatggcagtattatagttgctaaattcagcactgtgttcctgttgtcgtggttcaagacccaccaggtattttcagattataaaacttttctttctttcttaacagtttcaacaggccactcactcttaagggtgagaagaataaccacaattgtatgtgcctgttttttactcttagcattagatgaattcaaatttggaaacagattgatagcaattttttctaaaaacattagacttttgttaaccttttttttttttttaaatttgcttcaacaagctctccaccagttgactttctttggctaattttactttgcatgatatgccttaatatgccttcataaataaccattttaagtcataatttgtccttaagctgcttttttcttctattaattggatcatagtaaagagtagtcaatagggtcttcagctattaattgtagaggtgattaaaaccaacaaggagtttcatgtgcaaaggagataaggaatgaatataaagattgctatttgggtggctcttattaaactgtgtattttgtacttatcactacacgtatcccccaaatgcttacatgggagtttgaggttagtattttcacttccttggtgttagtactctattcacattcttattgtaaccttcctcatttcacagataaggaatctttggggattaaccaacctcctttctgtaatggtaatcattaaaataagtcctattgataaaggtcagatggagccctagagtgtattactgcatctatttttttccccgagaagataaaggaccttcagggatggcttaagtgtatctgtccagatgaaggatgggtcacatgacctcttggcttcccaagtctaagctctgtgactttgcaccagtgtgtgcatatatgtgcaaggcccttcaagtggtctgaaaccgtggctctaaaaaccacagctggtggagaggaggacagacacacttgccaccttgcctacctaattgccatctaaaatgggccgaacagtggatttcacaatagagttttcaccctttagatttacaacctgtcaggtggaaactgaagtgaaaactgctgcacacagcaattcagggagcaaaaaatgtgctgaggagactgtttacctaaaggttgttcttggtgctattccttgtcaaaatgtgaacacacacaaatgaggtttgtgcattgtcatccgtgggctgccattgagccagtaacccccagtggtctcatggtgctcttcgctccagtttggggaatgctggattctttcagcccctgcagccctccaggtcaaaatgacactttgtcactgagttttctacacagctctattagtaactgacagcacacgccttcaagggaacttcaagggaaacatggaataaactaagtctcaattgcaa

SEQ ID NO: 1972 - protein, 657 aa, Homo sapien [sequence omitted]

SEQ ID NO: 1973 - DNA, 357 bp, Homo sapien
acagagagactttgtctcaaaaaaaaaagaaaattttaattttaatgtagacagtatgaattatcttgttctgcagttggttgctttttgattgcttatttaatagagttgttaagatattttacatcttctcctgttagctgttcagcttttcctttcatattgagaacactacacagtgctgaagtccagctggtacacaccggggtgacaccttggctgcatctgttctcaacagtcagacacttcttctaattggttgatgctgggctgtactggttgctaaatattgcacatcattttaaaactatttgagatgcacttttgtactcaggaggccaaggcaggaggattgct

SEQ ID NO: 1974 - protein, 29 aa, Homo sapien
QRDFVSKKKENFNFNVDSMNYLVLQLVAF

SEQ ID NO: 1975 - DNA, 4152 bp, Homo sapien
cccaggccggctctggcctcctgacccagacagcgcagggcgcgagggatcgcgcggccgagcccgggtcgcgccgctcccagcatcggggccgctagccaagagttcgaggccttcccgatccggatgtgatgaaaaagagcaacagagggagaagtgtttcaggattgtaggagtggaagaggggaaagagaggcagagagggggaaggccccctcgcaggggagccggctggagtgagctggctggaaagagggggcggagtgcgcggagtcagagccgccaccgctgccgcagttgccgccactgcggcgtctgggctgagccggagggaggcgggaggacgcgcaggggcggccgccgccgtcgtcaggccaccggggcgaaaatgcggccgctgccggaggctcgctaactttccggggcggaagaggaggaggaggaggaggaaggggcttggagcgactacggggggatgcggagaagcagtcagttccctgcacccagcacctcacagcccttcctccgtgcgccctgccgggcggcgagctaggcggcagcggcgcggcgcgggctcggcggagcggcccatgtccggcgcgggcgaagccctcgctcccgggcccgtggggccgcagcgcgtggccgaggcgggcggcggccagctgggctccacagcccagggaaaatgtgataaagacaatactgagaaagatataactcaagctaccaatagccacttcacacatggagagatgcaagaccagtccatttggggaaatccttcggatggtgaactcattagaacccaacctcagcgcttgcctcagcttcagacttcagcacaggtgccaagtggtgaggaaataggcaagataaagaacggccacacaggtctgagcaatggaaatggaattcaccacggggccaaacacggatccgcagataatcgcaaactttcagcacctgtttctcaaaaaatgcatagaaaaattcagtccagcttgtctgtaaacagcgatatcagtaagaagagcaaagtaaatgctgtcttttcccaaaagacaggctcttcacctgaagattgttgtgtccactgtatcctggcttgcttgttctgcgaattcctgaccctttgcaacattgtcctgggacaagcgtcatgtggcatctgcacctcagaagcctgctgctgttgctgtggtgacgagatgggggatgattgtaactgcccttgtgatatggactgtggcatcatggatgcctgttgtgaatcatcagactgcttggaaatctgtatggaatgctgtggaatttgttttccttcataaatatttatcttttgtttgtgttaaaactggagagtgtttaaaaatttccttttggggggaagaaaagcacattgtaagattctcatgaaacaacatggaatttgcactgttaactcattattgtaagtaatctctgaaagcctttttactttaaccaaatctacatggtttaatatgtgaaattttaactactttaactagttttataaatttcttaatatgttacaataacttagggacattttgacaccccccttcccaaatgttaaatgccttctcctttttaccgatatttctgtttcttttaaccgttctcaggagcactttgctccaaatatattatttttcagtgtgtatttaaacgaggcagtttattttgatatgtatctattcatgattgaaaggaagcagtcttggccaggcacggtggcttacacctgtaaccctggcattttgggaggccaaggtgggcagattgcctgagctcaggagttcgagaccagccagggcaacatggtgaaaccccatctctactaaaatacaaaaagttagctgggcttggcggtgtgcgcctgtagtcccagctactcaggaggctgaggcaggagaattgcttgaacccgagaggcggaagttgcagtgagccgagattgtgccactgaactccaacctgcactccagcctgggcaacagagcgagactccatctctaaataaataaataaataaataaataaataaataaataaataaataaacaaaccagtctttattttaaaagaaactttaggaaacaaacccacataatagttgggaaccagtgttgatctctctcccttaccttctccacttgttcaacagactctgaatgccgactgtgtggactctcttcctcagactgtggggacagatacaattccactcctgtccacaggaacatgagatttagcagactaaggagatctgtaaagaatgaaccataccacaaggcatactgaagtgaggattataagagaaataaactcaaaatgctgttggaatatgcagagaattgctaccagaatattcagtaaggtttcagggagaatgtggcatttgaggactctcttagaatgagtgattcacctgctatttaaatgaattatttagatttttgacaaagatttaggtggacaccctaaactgtgtgtgcctttaaccagttaaaagaacagtgccttcagcatacttttttattagttgtaggaatacagctttttgaaaaagctataaagtttaaattaactaaaaatatgcattttcttacacataatttaaatgttatcatacttttttgatgaaaacataatgccttagtaaaatagctctatttaataaagaagattgagtactctgacacatttcatttaaattaggaaatttttaatattaaaatcccagtgttctgagttattgaaaggctttcttttattttgagagctttaggtctttttgggatgagaacattttagttgtttagtttgtttcttaagcagtgctattttttgtaaacacagataaatggaaaccattcttttcaatgcagaagaaatctagatatcccctactgtgaccaaatttctgtattacgattttatgttaaattaaactaatatggcaggttataatgatccttaagtgtaaagaaatcagtcaattacaagagtaattgtatagttattgagacctatagtgtgtggcttagatgaaagggagagtaaattttcataccatgctctctcctactcagtttgatctctctaaaattgtagtttggtttgatttaatataattcttagtagaaattttgaaagtatgctttgggattaataattatttttaatttttctggctgaatatcaaattgatagtaacaacagaagcataattttaggaaggctttcgcaaacctagccttttaagagaggtttttaacctgaagcatgagaatatatcacctgtggtttttcctttgagatgaaacgtagtttctagttatatcattacttaaagggcttaaaaagaaaaaacttagcaaacttttgaatctttcttttattgctatttacacatacatacacacatacaaaacctttaaattttgggatctgaatataattctggtaaacagctgtcttcatttttctcctctaaagaacttaattcatttgttacataaaatataaggaaatctttatactattttacagtaaccacaatctaaatatttacatatacccaaaattaacttatgctcatatattaggatgtgagaatatcatctgtttatggacacatgaaacctcctaatgacctggaattgttagaatatttgactttttatatgcaaagtttttcaaccaagtggtttgtctaatatttaaacatgtactggcacaatttgtgatgaaaatattagcacatttgcaataatgtttctccataacagagaatgttaatggataccagaattttatttttgtatttatgttcatagtacttttcctcttgtctactccagacagttattccataaagcatttgtataattaaaaggaaaacagaaaaaggaaaagtaggcaaatgtgaaaatagtttcaatatatcttatgatttcttaatgtaaaatgttttgttgaagtatatggctatcatgactaagtgctagaatttatagttacaggcggtgtccttttaaatgtggaaaggcttttaaaatattttaaaactggacctgtattatcctgaatacactattttgaaaatttttaagaaaaaaaaaa

SEQ ID NO: 1976 - protein, 355 aa, Homo sapien
VRGVRAATAAAVAATAASGLSRREAGGRAGAAAAVVRPPGRKCGRCRRLANFPGRKRRRRRRKGLGATTGGCGEAVSSLHPAPHSPSSVRPAGRRARRQRRGAGSAERPMSGAGEALAPGPVGPQRVAEAGGGQLGSTAQGKCDKDNTEKDITQATNSHFTHGEMQDQSIWGNPSDGELIRTQPQRLPQLQTSAQVPSGEEIGKIKNGHTGLSNGNGIHHGAKHGSADNRKLSAPVSQKMHRKIQSSLSVNSDISKKSKVNAVFSQKTGSSPEDCCVHCILACLFCEFLTLCNIVLGQASCGICTSEACCCCCGDEMGDDCNCPCDMDCGIMDACCESSDCLEICMECCGICFPS

SEQ ID NO: 1977 - DNA, 2425 bp, Homo sapien
gcggccgccggtcctccctccacctcctcctcggccccccctcgcttccctcctcccacttcccgagctccggcgtcgtcccggccacgctcgacgctgctgcaggaacaaaggaagaccccgcggcggcggcggcgccacctccgcctgctgctccgacccgctcccggcccgcggcggcggcaccagggcgcccggctcagccttcccggaggcctcggcccggcctcatcgtgccggcttcgcgcgcgaacccggctttcgcatttgggaccctgcaggaaaaatatggctcaggagactaaccagaccccggggcccatgctgtgtagcacaggatgtggcttttatggaaatcctaggacaaatggaatgtgttcagtttgctacaaagaacatcttcagaggcagcaaaatagtggcagaatgagcccaatggggacagctagtggttccaacagtcctacctcagattctgcatctgtacagagagcagacactagcttaaacaactgtgaaggtgctgctggcagcacatctgaaaaatcaagaaatgtgcctgtggctgccttgcctgtaactcagcaaatgacagaaatgagcatttcaagagaggacaaaataactaccccgaaaacagaggtgtcagagccagttgtcactcagcccagtccatcagtttctcagcccagtacttctcagagtgaagaaaaagctcctgaattgcccaaaccaaagaaaaacagatgtttcatgtgcagaaagaaagttggtcttacagggtttgactgccgatgtggaaatttgttttgtggacttcaccgttactctgacaagcacaactgtccgtatgattacaaagcagaagctgcagcaaaaatcagaaaagagaatccagttgttgtggctgaaaaaattcagagaatataaattacttcttgtgaagagactgaaactttgtttttattttaatatatcgtaggaaaacattaaagagcagatgcatggccatttttctttgatgttctccagagttttacattacacttgtctgtcttataattgatattttaggatgtttgggtgtttgttacaggcagaattggatagatacagccctacaaatgtatatgccctcccctgaaaaaaattggatgaaaatctgcacagcaaagtgaaacacacagataataggaacaaaatgtagttcccatgtgccaaacaaaataaatgaaatctctgcatgtttgcagcatatctgccttttgggaatgtaatcaaggtataatctttggctagtgttatgtgcctgtatttttttaaaatggtacaccagaaaaggactggcagtctacttctaccatagttaaacttcaccctctttaatttcacaacatattctttggaagcaggaagaaatgctcataaagaggatcagaccttctttcccgtgaaaccagtatttggcgccatatataagcctggttaaattggtcatctaaagctgtcaaataagacattctgtgaaaggtaaacatcgaaactggttataagtaaaaccatcaagccaacaacagggtcttgagataacctttgaagcttattgtactggcctgcaccagaagatgtctgcattactcattgctaaaaatgtgtagcacagaactgcactaggattaatttgtttacaagaagaaatttaaactctacgtttggttttcacatacagcagctctattgaataacatgcatctgaattttaagttgcaaaggtatctgaataatttttcatgtgcatcttttgtcgaatgttttggttcaagaaagaatgtttaaagctttttaaaagacttcagttcttaatgtaactgtacccttctgcatggaaaatcataaccaacatggctgcagtagacttcttagtggtatccagcgccacttgcagagggctgctttatcatattgtacttgggtgtaggactctagtgttcttgggtgtattgcatgggctgcattatctacagcattgtacaataacaactagaaaaggcagtatacttcactgatgcttgtctggtaataatcacttctgtgttataatggaaggttttttgtgatgtatgaaacttgtgttttttatatataaatgagtatagttagtgttgtggtaatgcctgttttcatctgtaaatagttaagtatgtacacgaggcactacttctgatttattgcaatgttcagtcctagtttttacttttattcttaaagcattcagttttgctttcaattttatgtaccttagttctgagttagacctgcagatgtgtacagatagttcatatttatgtattgcacataatcatgctattcagcattgatgctatattgtattatgtaaataataaaagccatgtacagagggaaa

SEQ ID NO: 1978 - protein, 213 aa, Homo sapien
MAQETNQTPGPMLCSTGCGFYGNPRTNGMCSVCYKEHLQRQQNSGRMSPMGTASGSNSPTSDSASVQRADTSLNNCEGAAGSTSEKSRNVPVAALPVTQQMTEMSISREDKITTPKTEVSEPVVTQPSPSVSQPSTSQSEEKAPELPKPKKNRCFMCRKKVGLTGFDCRCGNLFCGLHRYSDKHNCPYDYKAEAAAKIRKENPVVVAEKIQRI

SEQ ID NO: 1979 - DNA, 2625 bp, Homo sapien
  Unsure 893-917: Unknown base
tgaaaataaggatttttgaaagaattataccaattaaaattattaaaggcaaacatagaattcataaaaaatgtccaaagtagaaatgatgacctataatttggagcatttccaattcagtaatttcaattttgctcttgaaaacatttaatatatatccaagactgacatttctttagctgaacctaacgtttgggtctctgagtgaatttataataactccttccttccttagcatagggttttcaaaatttgatttataattcctatttccagtaaatattgttcatttgtccacatctctccctatgatatgttgctggaggtaagaatttctttcatattcctattttttttttccccatagactaggctcatagaatttaaacaagcaaattttcctgagctttttcttgccaaatgaaagaagactggtaaattctcatagagaggtttgtgtagttcttggctcttcctggggttaatgtgcttatattcacagtggcaaattggtctcagactttaatttatttatttttgatttgaatttctctttaaaagtatcaatttaaaaggtaactagaattattctttctcattttcaaaagtgatttttgcattattaaatttccctgccattgtaatgccatttcacgcagaaaaaaagtcagccagtaattaagaaaaaaagtgatggagattaagtagtattttggcttatttttaggactcatcatgagaagacacagttcctttaatcaggaaattaatatccataattttcactcaaaattgcagtatgtaaagcagattctcaaaaactctcctgaacacttatttatatatatgtttttatataagtaaaatttttctcatatttttatacgatatgnnnnnnnnnnnnnnnnnnnnnnnnntacttactacatgttctgtacttgtactttgtaccatgcatattcaaatgtttatatacataagtttattataacataaacagtaaaagtaatgaatactgtttaaaataactaatatagtattttttaatttttgtggggatggattctcaaatacttgtgattttaaaagattctaaagctaaaacacaacttgattttaaaaagaatgattctccttacacaattataaatatttgcagtaaatattttccttataatactgttttgaccccatttaaaaagtattagattatattcctttgatccaatgaaaactgaaccttataaatggttagctgaaagtagaccttattcttgtccttctttagaagagtaaagatttgtcctagggaagatggctgacttcggttcccaacatgcgtatgcatttagactgtagctcctcagccctgtggacacaaaatttggacagcttattaggttacgttagcaatgcatgacggtttctccaacactaagatattcacgttgaaacagatttcctgttcgtcttatgtgtctggtaaaattgtttccccaattacaatttgacatatcaatagagggttaacaagagtataattacataacagaattcctcatgaactgtaatcagtctacaggaaaatcattattttatcttgatttgcagatgaatatactgctaagaaagggagcaactctgacctttgttaaagttgatcttttgtaattgaggtataaggtatgaaaagataaaaaaccgaaggccagagaatcaggaaatgaaagatagtatggactgaaggtaacaatattttaatgttatgcaatatagccagagaaatattaaaaattagttgtttgctgtgcataggtggatctcgcaggaagctaatgaaacctaagcttcagtgcctctcacttagacatgttccattcgaggtcctgaacctaactttgtattaggaattctgtactaattttgttgaagaagaccagcaaagttgtgtacacttctacccccacaaaatctgcattgtccatgtgagtaaagtaaaataattcctgttatttttttctgttagaaataagtatggaggatatgtttttaaaaatttatgagttaattgaaatatccatatataacaagtgactttctcacaatatatatgatgtgatatatagggagatagtttcactttcatcatattttatacgttgattctgaactatagaaaaataataaatgggattttaattatagctcttagttgggaaagaaatatagagagatgtgggatttgaatgcccatgaaagacattttattttacttgaatatattcttgcttcactttaccctccataatatgttgtacattagtgctgatcaagtttacagagttacattttgctttcctaaccattcagtcaggaattaaaatatggcattgtataacaactgggaagaagctcatagtggatataaattagagtagataatgggtcaccttgatagcctctgtttacattacttgtatatgggcaaaataattattacctatacgtgtatttaagcttaattttcatataaacagtatttttaatctatgttaaaatagataatatctaaaagtgtgatctctaggtagtccttagtttattagtactgtacttcaaaaagat

SEQ ID NO: 1980 - protein, 26 aa, Homo sapien
KIRIFERIIPIKIIKGKHRIHKKCPK

SEQ ID NO: 1981 - DNA, 2312 bp, Homo sapien
ggcacgaggggaacgctccgtctggaacggcgcaggtcccagcagctggggttccccctcagcccgtgagcagccatgtccaaccccagcgccccaccaccatatgaagaccgcaaccccctgtacccaggccctctgccccctgggggctatgggcagccatctgtcctgccaggagggtatcctgcctaccctggctacccgcagcctggctacggtcaccctgctggctacccacagcccatgccccccacccacccgatgcccatgaactacggcccaggccatggctatgatggggaggagagagcggtgagtgatagcttcgggcctggagagtgggatgaccggaaagtgcgacacacttttatccgaaaggtttactccatcatctccgtgcagctgctcatcactgtggccatcattgctatcttcacctttgtggaacctgtcagcgcctttgtgaggagaaatgtggctgtctactacgtgtcctatgctgtcttcgttgtcacctacctgatccttgcctgctgccagggacccagacgccgtttcccatggaacatcattctgctgaccctttttacttttgccatgggcttcatgacgggcaccatttccagtatgtaccaaaccaaagccgtcatcattgcaatgatcatcactgcggtggtatccatttcagtcaccatcttctgctttcagaccaaggtggacttcacctcgtgcacaggcctcttctgtgtcctgggaattgtgctcctggtgactgggattgtcactagcattgtgctctacttccaatacgtttactggctccacatgctctatgctgctctgggggccatttgtttcaccctgttcctggcttacgacacacagctggtcctggggaaccggaagcacaccatcagccccgaggactacatcactggcgccctgcagatttacacagacatcatctacatcttcacctttgtgctgcagctgatgggggatcgcaattaaggagcaagcccccattttcacccgatcctgggctctcccttccaagctagagggctgggccctatgactgtggtctgggctttaggcccctttccttccccttgagtaacatgcccagtttcctttctgtcctggagacaggtggcctctctggctatggatgtgtgggtacttggtggggacggaggagctagggactaactgttgctcttggtgggcttggcagggactaggctgaagatgtgtcttctccccgccacctactgtatgacaccacattcttcctaacagctggggttgtgaggaatatgaaaagagcctattcgatagctagaagggaatatgaaaggtagaagtgacttcaaggtcacgaggttcccctcccacctctgtcacaggcttcttgactacgtagttggagctatttcttcccccagcaaagccagagagctttgtccccggcctcctggacacataggccattatcctgtattcctttggcttggcatcttttagctcaggaaggtagaagagatctgtgcccatgggtctccttgcttcaatcccttcttgtttcagtgacatatgtattgtttatctgggttagggatgggggacagataatagaacgagcaaagtaacctatacaggccagcatggaacagcatctcccctgggcttgctcctggcttgtgacgctataagacagagcaggccacatgtggccatctgctccccattcttgaaagctgctggggcctccttgcaggcttctggatctctggtcagagtgaactcttgcttcctgtattcaggcagctcagagcagaaagtaaggggcagagtcatacgtgtggccaggaagtagccagggtgaagagagactcggtgcgggcagggagaatgcctgggggtccctcacctggctagggagataccgaagcctactgtggtactgaagacttctgggttctttccttctgctaacccagggagggtcctaagaggaaggtgacttctctctgtttgtcttaagttgcactgggggatttctgacttgaggcccatctctccagccagccactgccttctttgtaatattaagtgccttgagctggaatggggaagggggacaagggtcagtctgtcgggtgggggcagaaatcaaatcagcccaaggatatagttaggattaattacttaatagagaaatcctaactatatcacacaaagggatacaactataaatgtaataaaatttatgtctagaagttaaaacccaaaaaaaaaaaaaaaaaaaa

SEQ ID NO: 1982 - protein, 311 aa, Homo sapien
MSNPSAPPPYEDRNPLYPGPLPPGGYGQPSVLPGGYPAYPGYPQPGYGHPAGYPQPMPPTHPMPMNYGPGHGYDGEERAVSDSFGPGEWDDRKVRHTFIRKVYSIISVQLLITVAIIAIFTFVEPVSAFVRRNVAVYYVSYAVFVVTYLILACCQGPRRRFPWNIILLTLFTFAMGFMTGTISSMYQTKAVIIAMIITAVVSISVTIFCFQTKVDFTSCTGLFCVLGIVLLVTGIVTSIVLYFQYVYWLHMLYAALGAICFTLFLAYDTQLVLGNRKHTISPEDYITGALQIYTDIIYIFTFVLQLMGDRN

SEQ ID NO: 1983 - DNA, 3576 bp, Homo sapien
gaaaggtcacagcgcggcagcgggtctggctggcggcagcggcgggagggagccgagagacccgagtgcacgtgtggagaagcggcggcacaagcgcggcggcgggagacactcccgcccccaccagactcaagccctcactcgactctcgcggccttcgttgctcgcacagctccctgcccaggctaggaggccggcttgcggggttgagtggcccgagctaagggtgcggagacctaagggcggcgactacgacggcgttgatatcggtggtaacgacggcctcagcaggcggggaagatgaaaggtagccggatcgagctgggagatgtgacaccacacaatattaaacagttgaaaagattgaatcaggtcatctttccagtcagctacaatgacaagttctacaaggatgtgctggaggttggcgagctagcaaaacttgcctatttcaatgatattgctgtaggtgcagtatgctgtagggtggatcattcacagaatcagaagagactttacatcatgacactaggatgtctggcaccttaccgaaggctaggaataggaactaaaatgttaaatcatgtcttaaacatctgtgaaaaagatggtacttttgacaacatttatctgcatgtccagatcagcaatgagtcggcaattgacttctacaggaagtttggctttgagattattgagacaaagaagaactactataagaggatagagcccgcagatgctcatgtgctgcagaaaaacctcaaagttccttctggtcagaatgcagatgtgcaaaagacagacaactgaacaaattacaaatgaactttcttgcacttgcttgtcgccaaataaaagagaggcccattgattcctcccccaccccaacacttttcttttaaagcttttctccctccttgttcttgtttttctttcttcctttccttttctctgagagttttaatactttcaaggactttaaaaaaataatcatgtttgaattgttttctcttatttttgtgaggtggtttgaaggaaggacaaggtagatctgtttagttttgcagttgaagttagatggtcctaaacatttaattgtcaaataatttcaaatttaatgtcctgctttcacattgaagggcagagcctacaaaacattgtatatttcaaaagacaaaaagaagcagcagcagtatcttgttctctaattcatagacaagttgagtgtgtttgtggtactttgggtttttaaacactttgggatactaatccctagacattgccttcactccacctttagtccttctgagcactctctcgggagttggaacattgttatccttgtaagaaatactaagcttatgttgatttttaagtaattatatcttctcttcttgctggtgggtggggcagtttggtttagtgttatactttggtctaagtatttgagttaaactgcttttttgctaatgagtgggctggttgttagcaggtttgtttttcctgctgttgattgttactagtggcattaacttttagaatttgggctggtgagattaattttttttaatatcccagctagagatatggcctttaactgacctaaagaggtgtgttgtgatttaattttttcccgttcctttttcttcagtaaacccaacaatagtctaaccttaaaaattgagttgatgtccttataggtcactacccctaaataaacctgaagcaggtgttttctcttggacatactaaaaaatacctaaaaggaagcttagatgggctgtgacacaaaaaattcaattactgtcatctaatgccagctgttaaaagtgtggccactgagcatttgattttataggaaaaaatagtatttttgagaataacatagctgtgctattgcacatctgttggaggacatcccagatttgcttatactcagtgcctgtgatattgagtttaaggatttgaggcaggggtaattattaaacatattgcttctattcttggaaaaatagaagtgtaaaatgttaataatacaaatgtcactgtgacctcctccactgtgaggactggtttatgccagatcattttccggcacacacggagtggctttgacagattgataactttgtaagatgggagacatctgaaatattcatgttttccttttgtagtcccatctccactatttagaaatgttctcagactttaaaataatgcacagggcttgagctttctgtcatttgactttaaaaggaagtttcattcatatttatcctcttatgtaaaattgcggtataaagtctcatttccaaatatgttaaatgacaaaattattttataaaatgtttatgcacactttataaccttaagtttttatttgagaatgtgaaagtacaaagtgcagtagacttcaacaatcttgagtgccaagaataatacagaaaaagaagacagttgatgaatgagtttatagggttctaatcttaagatggtaaaaatgtagaaagaccttgctggttttttgggggtattcgtttcttaaacaatccaaatctaagcttagaagaaaagtttagcgttaagcacctttatcttcatgaataagcttcagcttgctcttggcaagagaagagtgcttgagttacagaaggcataagtagtttgaagaatgcagcagcctttttgtaaacttcccagatatcaaaatagactttgatatataaatggttttctgagatgacactgcctctatttctataaccatttcacctggactatctaaccagtcctatgaatgtatccctaaatgtggttattgaaaacctaatagctgcctcatgacaagtacatgttatttaaggaggaaaaaatattaaattttgaattgagtgtgtaggctccctatcattatatatagagtttctttttccacggtagtcagtgacttaacctgaattgtaaatgtttgtaaagggttaattgtcctacatcaaacttagttaaataattccatccacttatggaggaggaggagaatgtggaagaggtaaaaagctgggcacaagttcatatgcctatgagtcagtaaagactgaagtaatgtcctatgttgagctggttattttgatatatgataataattatctttgaagtagaacaattctgttaactggaaaatcacaggatatatccatcatatttttcaggacagatagtttttactgtggggcaaataggttaaaattacactatgttagttgcatttaggttttaaagcaaagaatctgtagagaaatctatgcaatatatagtttgtccagattagctttcatttggggaatgaagttctgaaatatctaaagcagtttactcatcaattgaaaagtcctccaaaaagagaactattgggaaaccatggtgtggtggtggaaaagaaaagctccctcagttttttggagggaataacttaaaaaaatacttaaatggctaagtttacttggtgcagttaagaattaaacttgtcaattttaacattgctgttacatctgaaataaacttatgtgatgttctggt

SEQ ID NO: 1984 - protein, 169 aa, Homo sapien
MKGSRIELGDVTPHNIKQLKRLNQVIFPVSYNDKFYKDVLEVGELAKLAYFNDIAVGAVCCRVDHSQNQKRLYIMTLGCLAPYRRLGIGTKMLNHVLNICEKDGTFDNIYLHVQISNESAIDFYRKFGFEIIETKKNYYKRIEPADAHVLQKNLKVPSGQNADVQKTDN

SEQ ID NO: 1985 - DNA, 4577 bp, Homo sapien
gctacaatccatctggtctcctccagctccttctttctgcaacatggggaagaacaaactccttcatccaagtctggttcttctcctcttggtcctcctgcccacagacgcctcagtctctggaaaaccgcagtatatggttctggtcccctccctgctccacactgagaccactgagaagggctgtgtccttctgagctacctgaatgagacagtgactgtaagtgcttccttggagtctgtcaggggaaacaggagcctcttcactgacctggaggcggagaatgacgtactccactgtgtcgccttcgctgtcccaaagtcttcatccaatgaggaggtaatgttcctcactgtccaagtgaaaggaccaacccaagaatttaagaagcggaccacagtgatggttaagaacgaggacagtctggtctttgtccagacagacaaatcaatctacaaaccagggcagacagtgaaatttcgtgttgtctccatggatgaaaactttcaccccctgaatgagttgattccactagtatacattcaggatcccaaaggaaatcgcatcgcacaatggcagagtttccagttagagggtggcctcaagcaattttcttttcccctctcatcagagcccttccagggctcctacaaggtggtggtacagaagaaatcaggtggaaggacagagcaccctttcaccgtggaggaatttgttcttcccaagtttgaagtacaagtaacagtgccaaagataatcaccatcttggaagaagagatgaatgtatcagtgtgtggcctatacacatatgggaagcctgtccctggacatgtgactgtgagcatttgcagaaagtatagtgacgcttccgactgccacggtgaagattcacaggctttctgtgagaaattcagtggacagctaaacagccatggctgcttctatcagcaagtaaaaaccaaggtcttccagctgaagaggaaggagtatgaaatgaaacttcacactgaggcccagatccaagaagaaggaacagtggtggaattgactggaaggcagtccagtgaaatcacaagaaccataaccaaactctcatttgtgaaagtggactcacactttcgacagggaattcccttctttgggcaggtgcgcctagtagatgggaaaggcgtccctataccaaataaagtcatattcatcagaggaaatgaagcaaactattactccaatgctaccacggatgagcatggccttgtacagttctctatcaacaccaccaacgttatgggtacctctcttactgttagggtcaattacaaggatcgtagtccctgttacggctaccagtgggtgtcagaagaacacgaagaggcacatcacactgcttatcttgtgttctccccaagcaagagctttgtccaccttgagcccatgtctcatgaactaccctgtggccatactcagacagtccaggcacattatattctgaatggaggcaccctgctggggctgaagaagctctccttttattatctgataatggcaaagggaggcattgtccgaactgggactcatggactgcttgtgaagcaggaagacatgaagggccatttttccatctcaatccctgtgaagtcagacattgctcctgtcgctcggttgctcatctatgctgttttacctaccggggacgtgattggggattctgcaaaatatgatgttgaaaattgtctggccaacaaggtggatttgagcttcagcccatcacaaagtctcccagcctcacacgcccacctgcgagtcacagcggctcctcagtccgtctgcgccctccgtgctgtggaccaaagcgtgctgctcatgaagcctgatgctgagctctcggcgtcctcggtttacaacctgctaccagaaaaggacctcactggcttccctgggcctttgaatgaccaggacgatgaagactgcatcaatcgtcataatgtctatattaatggaatcacatatactccagtatcaagtacaaatgaaaaggatatgtacagcttcctagaggacatgggcttaaaggcattcaccaactcaaagattcgtaaacccaaaatgtgtccacagcttcaacagtatgaaatgcatggacctgaaggtctacgtgtaggtttttatgagtcagatgtaatgggaagaggccatgcacgcctggtgcatgttgaagagcctcacacggagaccgtacgaaagtacttccctgagacatggatctgggatttggtggtggtaaactcagcaggggtggctgaggtaggagtaacagtccctgacaccatcaccgagtggaaggcaggggccttctgcctgtctgaagatgctggacttggtatctcttccactgcctctctccgagccttccagcccttctttgtggagcttacaatgccttactctgtgattcgtggagaggccttcacactcaaggccacggtcctaaactaccttcccaaatgcatccgggtcagtgtgcagctggaagcctctcccgccttccttgctgtcccagtggagaaggaacaagcgcctcactgcatctgtgcaaacgggcggcaaactgtgtcctgggcagtaaccccaaagtcattaggaaatgtgaatttcactgtgagcgcagaggcactagagtctcaagagctgtgtgggactgaggtgccttcagttcctgaacacggaaggaaagacacagtcatcaagcctctgttggttgaacctgaaggactagagaaggaaacaacattcaactccctactttgtccatcaggtggtgaggtttctgaagaattatccctgaaactgccaccaaatgtggtagaagaatctgcccgagcttctgtctcagttttgggagacatattaggctctgccatgcaaaacacacaaaatcttctccagatgccctatggctgtggagagcagaatatggtcctctttgctcctaacatctatgtactggattatctaaatgaaacacagcagcttactccagaggtcaagtccaaggccattggctatctcaacactggttaccagagacagttgaactacaaacactatgatggctcctacagcacctttggggagcgatatggcaggaaccagggcaacacctggctcacagcctttgttctgaagacttttgcccaagctcgagcctacatcttcatcgatgaagcacacattacccaagccctcatatggctctcccagaggcagaaggacaatggctgtttcaggagctctgggtcactgctcaacaatgccataaagggaggagtagaagatgaagtgaccctctccgcctatatcaccatcgcccttctggagattcctctcacagtcactcaccctgttgtccgcaatgccctgttttgcctggagtcagcctggaagacagcacaagaaggggaccatggcagccatgtatataccaaagcactgctggcctatgcttttgccctggcaggtaaccaggacaagaggaaggaagtactcaagtcacttaatgaggaagctgtgaagaaagacaactctgtccattgggagcgccctcagaaacccaaggcaccagtggggcatttttacgaaccccaggctccctctgctgaggtggagatgacatcctatgtgctcctcgcttatctcacggcccagccagccccaacctcggaggacctgacctctgcaaccaacatcgtgaagtggatcacgaagcagcagaatgcccagggcggtttctcctccacccaggacacagtggtggctctccatgctctgtccaaatatggagccgccacatttaccaggactgggaaggctgcacaggtgactatccagtcttcagggacattttccagcaaattccaagtggacaacaacaatcgcctgttactgcagcaggtctcattgccagagctgcctggggaatacagcatgaaagtgacaggagaaggatgtgtctacctccagacctccttgaaatacaatattctcccagaaaaggaagagttcccctttgctttaggagtgcagactctgcctcaaacttgtgatgaacccaaagcccacaccagcttccaaatctccctaagtgtcagttacacagggagccgctctgcctccaacatggcgatcgttgatgtgaagatggtctctggcttcattcccctgaagccaacagtgaaaatgcttgaaagatctaaccatgtgagccggacagaagtcagcagcaaccatgtcttgatttaccttgataaggtgtcaaatcagacactgagcttgttcttcacggttctgcaagatgtcccagtaagagatctcaaaccagccatagtgaaagtctatgattactacgagacggatgagtttgcaatcgctgagtacaatgctccttgcagcaaagatcttggaaatgcttgaagaccacaaggctgaaaagtgctttgctggagtcctgttctctgagctccacagaagacacgtgtttttgtatctttaaagacttgatgaataaacactttttctggtc

SEQ ID NO: 1986 - protein, 1474 aa, Homo sapien
MGKNKLLHPSLVLLLLVLLPTDASVSGKPQYMVLVPSLLHTETTEKGCVLLSYLNETVTVSASLESVRGNRSLFTDLEAENDVLHCVAFAVPKSSSNEEVMFLTVQVKGPTQEFKKRTTVMVKNEDSLVFVQTDKSIYKPGQTVKFRVVSMDENFHPLNELIPLVYIQDPKGNRIAQWQSFQLEGGLKQFSFPLSSEPFQGSYKVVVQKKSGGRTEHPFTVEEFVLPKFEVQVTVPKIITILEEEMNVSVCGLYTYGKPVPGHVTVSICRKYSDASDCHGEDSQAFCEKFSGQLNSHGCFYQQVKTKVFQLKRKEYEMKLHTEAQIQEEGTVVELTGRQSSEITRTITKLSFVKVDSHFRQGIPFFGQVRLVDGKGVPIPNKVIFIRGNEANYYSNATTDEHGLVQFSINTTNVMGTSLTVRVNYKDRSPCYGYQWVSEEHEEAHHTAYLVFSPSKSFVHLEPMSHELPCGHTQTVQAHYILNGGTLLGLKKLSFYYLIMAKGGIVRTGTHGLLVKQEDMKGHFSISIPVKSDIAPVARLLIYAVLPTGDVIGDSAKYDVENCLANKVDLSFSPSQSLPASHAHLRVTAAPQSVCALRAVDQSVLLMKPDAELSASSVYNLLPEKDLTGFPGPLNDQDDEDCINRHNVYINGITYTPVSSTNEKDMYSFLEDMGLKAFTNSKIRKPKMCPQLQQYEMHGPEGLRVGFYESDVMGRGHARLVHVEEPHTETVRKYFPETWIWDLVVVNSAGVAEVGVTVPDTITEWKAGAFCLSEDAGLGISSTASLRAFQPFFVELTMPYSVIRGEAFTLKATVLNYLPKCIRVSVQLEASPAFLAVPVEKEQAPHCICANGRQTVSWAVTPKSLGNVNFTVSAEALESQELCGTEVPSVPEHGRKDTVIKPLLVEPEGLEKETTFNSLLCPSGGEVSEELSLKLPPNVVEESARASVSVLGDILGSAMQNTQNLLQMPYGCGEQNMVLFAPNIYVLDYLNETQQLTPEVKSKAIGYLNTGYQRQLNYKHYDGSYSTFGERYGRNQGNTWLTAFVLKTFAQARAYIFIDEAHITQALIWLSQRQKDNGCFRSSGSLLNNAIKGGVEDEVTLSAYITIALLEIPLTVTHPVVRNALFCLESAWKTAQEGDHGSHVYTKALLAYAFALAGNQDKRKEVLKSLNEEAVKKDNSVHWERPQKPKAPVGHFYEPQAPSAEVEMTSYVLLAYLTAQPAPTSEDLTSATNIVKWITKQQNAQGGFSSTQDTVVALHALSKYGAATFTRTGKAAQVTIQSSGTFSSKFQVDNNNRLLLQQVSLPELPGEYSMKVTGEGCVYLQTSLKYNILPEKEEFPFALGVQTLPQTCDEPKAHTSFQISLSVSYTGSRSASNMAIVDVKMVSGFIPLKPTVKMLERSNHVSRTEVSSNHVLIYLDKVSNQTLSLFFTVLQDVPVRDLKPAIVKVYDYYETDEFAIAEYNAPCSKDLGNA

SEQ ID NO: 1987 - DNA, 5067 bp, Homo sapien
ctcctccccatcctctccctctgtccctctgtccctctgaccctgcactgtcccagcaccatgggacccacctcaggtcccagcctgctgctcctgctactaacccacctccccctggctctggggagtcccatgtactctatcatcacccccaacatcttgcggctggagagcgaggagaccatggtgctggaggcccacgacgcgcaaggggatgttccagtcactgttactgtccacgacttcccaggcaaaaaactagtgctgtccagtgagaagactgtgctgacccctgccaccaaccacatgggcaacgtcaccttcacgatcccagccaacagggagttcaagtcagaaaaggggcgcaacaagttcgtgaccgtgcaggccaccttcgggacccaagtggtggagaaggtggtgctggtcagcctgcagagcgggtacctcttcatccagacagacaagaccatctacacccctggctccacagttctctatcggatcttcaccgtcaaccacaagctgctacccgtgggccggacggtcatggtcaacattgagaacccggaaggcatcccggtcaagcaggactccttgtcttctcagaaccagcttggcgtcttgcccttgtcttgggacattccggaactcgtcaacatgggccagtggaagatccgagcctactatgaaaactcaccacagcaggtcttctccactgagtttgaggtgaaggagtacgtgctgcccagtttcgaggtcatagtggagcctacagagaaattctactacatctataacgagaagggcctggaggtcaccatcaccgccaggttcctctacgggaagaaagtggagggaactgcctttgtcatcttcgggatccaggatggcgaacagaggatttccctgcctgaatccctcaagcgcattccgattgaggatggctcgggggaggttgtgctgagccggaaggtactgctggacggggtgcagaacctccgagcagaagacctggtggggaagtctttgtacgtgtctgccaccgtcatcttgcactcaggcagtgacatggtgcaggcagagcgcagcgggatccccatcgtgacctctccctaccagatccacttcaccaagacacccaagtacttcaaaccaggaatgccctttgacctcatggtgttcgtgacgaaccctgatggctctccagcctaccgagtccccgtggcagtccagggcgaggacactgtgcagtctctaacccagggagatggcgtggccaaactcagcatcaacacacaccccagccagaagcccttgagcatcacggtgcgcacgaagaagcaggagctctcggaggcagagcaggctaccaggaccatgcaggctctgccctacagcaccgtgggcaactccaacaattacctgcatctctcagtgctacgtacagagctcagacccggggagaccctcaacgtcaacttcctcctgcgaatggaccgcgcccacgaggccaagatccgctactacacctacctgatcatgaacaagggcaggctgttgaaggcgggacgccaggtgcgagagcccggccaggacctggtggtgctgcccctgtccatcaccaccgacttcatcccttccttccgcctggtggcgtactacacgctgatcggtgccagcggccagagggaggtggtggccgactccgtgtgggtggacgtcaaggactcctgcgtgggctcgctggtggtaaaaagcggccagtcagaagaccggcagcctgtacctgggcagcagatgaccctgaagatagagggtgaccacggggcccgggtggtactggtggccgtggacaagggcgtgttcgtgctgaataagaagaacaaactgacgcagagtaagatctgggacgtggtggagaaggcagacatcggctgcaccccgggcagtgggaaggattacgccggtgtcttctccgacgcagggctgaccttcacgagcagcagtggccagcagaccgcccagagggcagaacttcagtgcccgcagccagccgcccgccgacgccgttccgtgcagctcacggagaagcgaatggacaaagtcggcaagtaccccaaggagctgcgcaagtgctgcgaggacggcatgcgggagaaccccatgaggttctcgtgccagcgccggacccgtttcatctccctgggcgaggcgtgcaagaaggtcttcctggactgctgcaactacatcacagagctgcggcggcagcacgcgcgggccagccacctgggcctggccaggagtaacctggatgaggacatcattgcagaagagaacatcgtttcccgaagtgagttcccagagagctggctgtggaacgttgaggacttgaaagagccaccgaaaaatggaatctctacgaagctcatgaatatatttttgaaagactccatcaccacgtgggagattctggctgtcagcatgtcggacaagaaagggatctgtgtggcagaccccttcgaggtcacagtaatgcaggacttcttcatcgacctgcggctaccctactctgttgttcgaaacgagcaggtggaaatccgagccgttctctacaattaccggcagaaccaagagctcaaggtgagggtggaactactccacaatccagccttctgcagcctggccaccaccaagaggcgtcaccagcagaccgtaaccatcccccccaagtcctcgttgtccgttccatatgtcatcgtgccgctaaagaccggcctgcaggaagtggaagtcaaggctgccgtctaccatcatttcatcagtgacggtgtcaggaagtccctgaaggtcgtgccggaaggaatcagaatgaacaaaactgtggctgttcgcaccctggatccagaacgcctgggccgtgaaggagtgcagaaagaggacatcccacctgcagacctcagtgaccaagtcccggacaccgagtctgagaccagaattctcctgcaagggaccccagtggcccagatgacagaggatgccgtcgacgcggaacggctgaagcacctcattgtgaccccctcgggctgcggggaacagaacatgatcggcatgacgcccacggtcatcgctgtgcattacctggatgaaacggagcagtgggagaagttcggcctagagaagcggcagggggccttggagctcatcaagaaggggtacacccagcagctggccttcagacaacccagctctgcctttgcggccttcgtgaaacgggcacccagcacctggctgaccgcctacgtggtcaaggtcttctctctggctgtcaacctcatcgccatcgactcccaagtcctctgcggggctgttaaatggctgatcctggagaagcagaagcccgacggggtcttccaggaggatgcgcccgtgatacaccaagaaatgattggtggattacggaacaacaacgagaaagacatggccctcacggcctttgttctcatctcgctgcaggaggctaaagatatttgcgaggagcaggtcaacagcctgccaggcagcatcactaaagcaggagacttccttgaagccaactacatgaacctacagagatcctacactgtggccattgctggctatgctctggcccagatgggcaggctgaaggggcctcttcttaacaaatttctgaccacagccaaagataagaaccgctgggaggaccctggtaagcagctctacaacgtggaggccacatcctatgccctcttggccctactgcagctaaaagactttgactttgtgcctcccgtcgtgcgttggctcaatgaacagagatactacggtggtggctatggctctacccaggccaccttcatggtgttccaagccttggctcaataccaaaaggacgcccctgaccaccaggaactgaaccttgatgtgtccctccaactgcccagccgcagctccaagatcacccaccgtatccactgggaatctgccagcctcctgcgatcagaagagaccaaggaaaatgagggtttcacagtcacagctgaaggaaaaggccaaggcaccttgtcggtggtgacaatgtaccatgctaaggccaaagatcaactcacctgtaataaattcgacctcaaggtcaccataaaaccagcaccggaaacagaaaagaggcctcaggatgccaagaacactatgatccttgagatctgtaccaggtaccggggagaccaggatgccactatgtctatattggacatatccatgatgactggctttgctccagacacagatgacctgaagcagctggccaatggtgttgacagatacatctccaagtatgagctggacaaagccttctccgataggaacaccctcatcatctacctggacaaggtctcacactctgaggatgactgtctagctttcaaagttcaccaatactttaatgtagagcttatccagcctggagcagtcaaggtctacgcctattacaacctggaggaaagctgtacccggttctaccatccggaaaaggaggatggaaagctgaacaagctctgccgtgatgaactgtgccgctgtgctgaggagaattgcttcatacaaaagtcggatgacaaggtcaccctggaagaacggctggacaaggcctgtgagccaggagtggactatgtgtacaagacccgactggtcaaggttcagctgtccaatgactttgacgagtacatcatggccattgagcagaccatcaagtcaggctcggatgaggtgcaggttggacagcagcgcacgttcatcagccccatcaagtgcagagaagccctgaagctggaggagaagaaacactacctcatgtggggtctctcctccgatttctggggagagaagcccaacctcagctacatcatcgggaaggacacttgggtggagcactggcctgaggaggacgaatgccaagacgaagagaaccagaaacaatgccaggacctcggcgccttcaccgagagcatggttgtctttgggtgccccaactgaccacacccccattcc

SEQ ID NO: 1988 - protein, 1663 aa, Homo sapien
MGPTSGPSLLLLLLTHLPLALGSPMYSIITPNILRLESEETMVLEAHDAQGDVPVTVTVHDFPGKKLVLSSEKTVLTPATNHMGNVTFTIPANREFKSEKGRNKFVTVQATFGTQVVEKVVLVSLQSGYLFIQTDKTIYTPGSTVLYRIFTVNHKLLPVGRTVMVNIENPEGIPVKQDSLSSQNQLGVLPLSWDIPELVNMGQWKIRAYYENSPQQVFSTEFEVKEYVLPSFEVIVEPTEKFYYIYNEKGLEVTITARFLYGKKVEGTAFVIFGIQDGEQRISLPESLKRIPIEDGSGEVVLSRKVLLDGVQNLRAEDLVGKSLYVSATVILHSGSDMVQAERSGIPIVTSPYQIHFTKTPKYFKPGMPFDLMVFVTNPDGSPAYRVPVAVQGEDTVQSLTQGDGVAKLSINTHPSQKPLSITVRTKKQELSEAEQATRTMQALPYSTVGNSNNYLHLSVLRTELRPGETLNVNFLLRMDRAHEAKIRYYTYLIMNKGRLLKAGRQVREPGQDLVVLPLSITTDFIPSFRLVAYYTLIGASGQREVVADSVWVDVKDSCVGSLVVKSGQSEDRQPVPGQQMTLKIEGDHGARVVLVAVDKGVFVLNKKNKLTQSKIWDVVEKADIGCTPGSGKDYAGVFSDAGLTFTSSSGQQTAQRAELQCPQPAARRRRSVQLTEKRMDKVGKYPKELRKCCEDGMRENPMRFSCQRRTRFISLGEACKKVFLDCCNYITELRRQHARASHLGLARSNLDEDIIAEENIVSRSEFPESWLWNVEDLKEPPKNGISTKLMNIFLKDSITTWEILAVSMSDKKGICVADPFEVTVMQDFFIDLRLPYSVVRNEQVEIRAVLYNYRQNQELKVRVELLHNPAFCSLATTKRRHQQTVTIPPKSSLSVPYVIVPLKTGLQEVEVKAAVYHHFISDGVRKSLKVVPEGIRMNKTVAVRTLDPERLGREGVQKEDIPPADLSDQVPDTESETRILLQGTPVAQMTEDAVDAERLKHLIVTPSGCGEQNMIGMTPTVIAVHYLDETEQWEKFGLEKRQGALELIKKGYTQQLAFRQPSSAFAAFVKRAPSTWLTAYVVKVFSLAVNLIAIDSQVLCGAVKWLILEKQKPDGVFQEDAPVIHQEMIGGLRNNNEKDMALTAFVLISLQEAKDICEEQVNSLPGSITKAGDFLEANYMNLQRSYTVAIAGYALAQMGRLKGPLLNKFLTTAKDKNRWEDPGKQLYNVEATSYALLALLQLKDFDFVPPVVRWLNEQRYYGGGYGSTQATFMVFQALAQYQKDAPDHQELNLDVSLQLPSRSSKITHRIHWESASLLRSEETKENEGFTVTAEGKGQGTLSVVTMYHAKAKDQLTCNKFDLKVTIKPAPETEKRPQDAKNTMILEICTRYRGDQDATMSILDISMMTGFAPDTDDLKQLANGVDRYISKYELDKAFSDRNTLIIYLDKVSHSEDDCLAFKVHQYFNVELIQPGAVKVYAYYNLEESCTRFYHPEKEDGKLNKLCRDELCRCAEENCFIQKSDDKVTLEERLDKACEPGVDYVYKTRLVKVQLSNDFDEYIMAIEQTIKSGSDEVQVGQQRTFISPIKCREALKLEEKKHYLMWGLSSDFWGEKPNLSYIIGKDTWVEHWPEEDECQDEENQKQCQDLGAFTESMVVFGCPN

SEQ ID NO: 1989 - DNA, 1352 bp, Homo sapien
ggggggaaacggaagtgagcggcggggtcgactgacggtaacggggcagagaggctgttcgcagagctgcggaagatgaatgccagaggacttggatctgagctaaaggacagtattccagttactgaactttcagcaagtggaccttttgaaagtcatgatcttcttcggaaaggtttttcttgtgtgaaaaatgaacttttgcctagtcatccccttgaattatcagaaaaaaatttccagctcaaccaagataaaatgaatttttccacactgagaaacattcagggtctatttgctccgctaaaattacagatggaattcaaggcagtgcagcaggttcagcgtcttccatttctttcaagctcaaatctttcactggatgttttgaggggtaatgatgagactattggatttgaggatattcttaatgatccatcacaaagcgaagtcatgggagagccacacttgatggtggaatataaacttggtttactgtaatagtgtgctgttcatggaaaccgagggctgcatcttgtttatagtcatctttgtactgtaatttgatgtacacaacattaaaagtactgacacctgagaatttctgctcaagtagtatcagtgatcatttaaaatttggaggggtctttggtttacagccatgtgacaattaaaagcactaaagggagatcatgttaaagctcttaatttatattaaaacagtagcctttgtctttaaaaaagttgttgctcatgaatattataaaatgatctacaggtttcaattcaacctgtttctaggtttttttgtaaatttagttttgattaagcattataagcatttgagtctataaactttatagtagcatctttcagaataaacatttttaattgatttcagtggcaactctcaaattgattacaatatgagatatatcagtgtcgtccattaacactcataagaataatatttactgtgtcagtgctattttaggattatagttattgtttgattatttcaggttgaaaagtagaagttccaaggttttgattttggtctggtctttaagtgaaaaattaaagcaaccagtagatgtaggttaaacttttacttcatagacttaatatgtgattaatatattgccaagcaacactgttaaagaaaagtaaaactcattttttcttgttcttaatttatatattacaagatactgtaaggtattctttatgaagttgatatataaaaatttacatttttagaacattagtgaatggatcatcttttacaattaaaagtatattttgattatcagtttcttagcaaaaaaaaaaaaaaaaaaaaaaaaaaaaaa

SEQ ID NO: 1990 - protein, 141 aa, Homo sapien
MNARGLGSELKDSIPVTELSASGPFESHDLLRKGFSCVKNELLPSHPLELSEKNFQLNQDKMNFSTLRNIQGLFAPLKLQMEFKAVQQVQRLPFLSSSNLSLDVLRGNDETIGFEDILNDPSQSEVMGEPHLMVEYKLGLL

SEQ ID NO: 1991 - DNA, 1689 bp, Homo sapien
cgggagcgtggggtatctcgaggtgccgggttgcaggcgctcaggggcgctagggtttgaggcctgctttctgctcgcgccagcagagcactacctgaggcagcgaggcgcagcgagcctagcctccccgcgccctgggcagtgtggccatggagaatcaggtgttgacgccgcatgtctactgggctcagcgacaccgcgagctatatctgcgcgtggagctgagtgacgtacagaaccctgccatcagcatcactgaaaacgtgctgcatttcaaagctcaaggacatggtgccaaaggagacaatgtctatgaatttcacctggagttcttagaccttgtgaaaccagagcctgtttacaaactgacccagaggcaggtaaacattacagtacagaagaaagtgagtcagtggtgggagagactcacaaagcaggaaaagcgaccactgtttttggctcctgactttgatcgttggctggatgaatctgatgcggaaatggagctcagagctaaggaagaagagcgcctaaataaactccgactggaaagcgaaggctctcctgaaactcttacaaacttaaggaaaggatacctgtttatgtataatcttgtgcaattcttgggattctcctggatctttgtcaacctgactgtgcgattctgtatcttgggaaaagagtccttttatgacacattccatactgtggctgacatgatgtatttctgccagatgctggcagttgtggaaactatcaatgcagcaattggagtcactacgtcaccggtgctgccttctctgatccagcttcttggaagaaattttattttgtttatcatctttggcaccatggaagaaatgcagaacaaagctgtggttttctttgtgttttatttgtggagtgcaattgaaattttcaggtactctttctacatgctgacgtgcattgacatggattggaaggtgctcacatggcttcgttacactctgtggattcccttatatccactgggatgtttggtggaagctgtctcagtgattcagtccattccaatattcaatgagaccggacgattcagtttcacattgccatatccagtgaaaatcaaagttagattttccttttttcttcagatttatcttataatgatatttttaggtttatacataaattttcgtcacctttataaacagcgcagacggcgctatggaaaaaaaagaaaaagatccactaaaaagaaagatttagatggcttcttgccagtttgagcctaatctgattcttacagttttaccttcttgaaccaatgtaaaagtttttttaatgttaaatgattaaattctcagtgaggctatcttccttttccccagtaacattcctgaatttactgttatcttattgtagtacttgcatgacatggattcctgatatctgatgagaggttcattcttgtgtattcagttaatgacaccaaaaggctcagcccaccccaaccctatctcatgttcagtctgtctaatacatgccagagatttttttttcaaaaagtgctttatccctacaatgtactgacagttcttacagttgaggatttggttcttttcagctaattgcttggtggattaaaaaaagcaagactaatgtcaactctaatggaaggctggttaaaagtggactcaggcaagg

SEQ ID NO: 1992 - protein, 373 aa, Homo sapien
MENQVLTPHVYWAQRHRELYLRVELSDVQNPAISITENVLHFKAQGHGAKGDNVYEFHLEFLDLVKPEPVYKLTQRQVNITVQKKVSQWWERLTKQEKRPLFLAPDFDRWLDESDAEMELRAKEEERLNKLRLESEGSPETLTNLRKGYLFMYNLVQFLGFSWIFVNLTVRFCILGKESFYDTFHTVADMMYFCQMLAVVETINAAIGVTTSPVLPSLIQLLGRNFILFIIFGTMEEMQNKAVVFFVFYLWSAIEIFRYSFYMLTCIDMDWKVLTWLRYTLWIPLYPLGCLVEAVSVIQSIPIFNETGRFSFTLPYPVKIKVRFSFFLQIYLIMIFLGLYINFRHLYKQRRRRYGKKRKRSTKKKDLDGFLPV

SEQ ID NO: 1993 - DNA, 2183 bp, Homo sapien
ccagggcctgactaaacctggagactcgggtggccgaggggcttcataccagctgaagagcgacaagccgctggcagccgcggatctcaccgccgctcagggtttttagaacttcagccataaaaatgggcagaattttccttgatcatatcggtggtacccgtctgttttcttgtgcaaactgtgatacgatcctgaccaaccgctcagaactcatctccactcgtttcacaggcgccactggcagagcatttctttttaacaaggtagttaacctgcagtacagcgaagttcaagatcgggtcatgctcactggccgccacatggttcgagatgtgagctgcaaaaactgcaatagcaaactgggatggatctatgagtttgccactgaagacagccagcgatataaggaaggccgcgtgatcctggaacgtgctctagttcgagagagtgagggctttgaggagcatgtaccatctgataactcttgaagatacagagagaaatccatcttttcccaggtctccttcactgaaaacaaaaatctacttacatacactgtcaccttagcatcagagtcggattaatgaactgcggaacaagaggttgtgagaatctaagatggaacctttctttctttctttctttttttttaaattttgtattttccatccaacagcagtgtgtagagagaatattatgcagatgccgttaattttttaccctatgtttacatcttgaggcagcagagtctgtctgcagctatgtggtgagctatgtaaggaaaaaaatctgggctgttagagtgaaaaagtgtgttttatgtcaattgtgaaaggaaaatgttaggagtatggtttttaaacttgggcttcattttaaacttttttttttaaacccagttatttcacttgatttgctagcttcagagaagagatccgaatctgtgcccagcgctaaaggctcagtgttagcatggcttgtgctggccggtgtgccatattcttgttggagatgaaccgtagcaccagagcccattcttccttgtcagtcttggcccaaagatgtcaccattcctagttatttgtcaccacataattggtgttgattggaaactttttctgagatgggacagaactgctgggttgtctttttccatgtaacttaagcatagtaatataaataaagtaatagttggatgcttttggtcctgtgttgcttttaaaaacaccttataaaagaggagagtatttgataagcaattttcatagtagtaaagttttttttcatctcttaaactaaattgaccatgcatataatattctttgtttaaatgaaagcatactgttgaaacccgcagtgttgcatttagaaaacagttgaacagaatgtcaatgtgcattcatgcaaaaaaacatttaatctgcatctgttttagaaaagggggaaatgaagcaacttgtctaaaaatactgctttacaaagcatttcagcctttccccctcagttttgcattgattttttgacaagtctgtagagcctaatagtttccatcaaaggcctagatctcttatttagcatttttttcagctcttctctcagaagttcagctgttgaaacgaaaactgtactttgtaccctcacatacaaagggatcaaatttgacctggtgttattttagccccaaatttatgacattacacaatattaaaatgtaaatgtttctttacccaaactacttctagatattctagtatttgcttctggtggaattaaatgacggtaaaattggctaattatttgaatgaatgaatggatggatgttttgcatgctcaatttctaggtcctttgtctagaaaggaaatttgcctcagttgaattagtgaaatatttctgtcgttgatattaaaagtgacttctgagtacagttaagttcctcctatttgccactgggctgttggttagaagcataggtaactgattaagtaggtatgatactgcatttgaaataagtggacacaaactatcctttctccaccatggactcaatctgagaacaacagcattcatttccattcatttccatactggcttttgattatatgcagattcctagtagcatgccttacctacagcactatgtgcatttgctgtcacaataaagtatattttgtcttgcaaa

SEQ ID NO: 1994 - protein, 121 aa, Homo sapien
MGRIFLDHIGGTRLFSCANCDTILTNRSELISTRFTGATGRAFLFNKVVNLQYSEVQDRVMLTGRHMVRDVSCKNCNSKLGWIYEFATEDSQRYKEGRVILERALVRESEGFEEHVPSDNS

SEQ ID NO: 1995 - DNA, 2714 bp, Homo sapien
ggcggcggtcccgaggggcggcggccgcgctgctccctgagaacgggtcccgcagctgggcaggcgggcggcctgagggcgcggagccatgaagctgtacagcctcagcgtcctctacaaaggcgaggccaaggtggtgctgctcaaagccgcatacgatgtgtcttccttcagctttttccagagatccagcgttcaggaattcatgaccttcacgagtcaactgattgtggagcgctcatcgaaaggcactagagcttctgtcaaagaacaagactatctgtgccacgtctacgtccggaatgatagtcttgcaggtgtggtcattgctgacaatgaatacccatcccgggtggcctttaccttgctggagaaggtactagatgaattctccaagcaagtcgacaggatagactggccagtaggatcccctgctacaatccattacccagccctggatggtcacctcagtagataccagaacccacgagaagctgatcccatgactaaagtgcaggccgaactagatgagaccaaaatcattctgcacaacaccatggagtctctgttagagcgaggtgagaagctagatgacttggtgtccaaatccgaggtgctgggaacacagtctaaagccttctataaaactgcccggaaacaaaactcatgctgtgccatcatgtgatgcagcctgccagaggcccaatgctggaatggcaccatcattcacatcagaactgcagcccctggaaaagaagagacagccatagacgaggagccagagtgggggcagactggccatttttattttgaagttcctgcgagaaatggatggtggaagggtggcgaatgttcaaattcatatgtgtggtagtgattcttggaaagaatttgaggtccccaaaggtgtatttttgggcaaatgaaaccataaactccgactggcttctgtagatgccaaagggctctttttcagctaaccctgggaaggctctgtgggagggaggtcggagccagctgtttctcgatctttggtatatctttggatcttatttgtacattaatgatattaacactccagtggggggtggggagtccctgatgctagggctggggtgggtggagtttgaagactcttgggaaagcctctcctggggccactgttgggggtgggagtgagcccaccacagaggccacaggcaggcccccacttcaggcccaaggcctggggcggggggaacagtcactgggtctcagattctgagactgttgtttagcttacctttctgctaggattggcttcccgcagagggcagggcccatcctaagcagcttccaagtcccacaaaggtggcttgtgggaggatttggaaggagctgcattgtgggcggggagtgtgtgggttgggttcgtaccagcaagtagactaggaactgagcccaggaaagggggatgttttcctggtgtttggatggtcagctgggagtgtccatcatcaggggaagatcaaacacaggtgcactcagctgcccagggcctctgggacacttgccttgacttgcaacttgccttgaacatcacgatcaaagcagcaggtgctgtggtctctcaaaattgatttttatttgactctgtggctctaagactgccttgaaccgcctgaggcctatgcatctgaacaagtgggtctctcccttgagcaccaggagtgggtgccagccggccccgaggattcccagcaccccacctatggtcttgccagcataggcttgctagttccttcttggtcagaggtagctgcagaggggggaggccaagggtttggtctaagctgtgccctgccacctggcaggaggcccactcactgcccaagtcatggcaacaggctggagcagcccaggagatgggcctaaaatgttctggatcccttgggtcctagtgttatgttccagtctgcccacctgtgctcaggatgcagccctgggatccagcacccatggaagcttctgctgggatggtgtcacctatgggttttgaaccagtgtggtatggtccttgggagctctgctctgagcttgccacactgctgagagcacccactgtcctgaccagagtctcagtggtcctgacccccaatgtgggcaggggctgggcaggagggtggggtctgctgtgggttcagaggactccacctcctggctggtttacctgctgctgcccattttctctgggtactgctggccagaggactttagcctacccctgaagagcctgtccatgtcattttcctactgccatagataccctaagcccagggccccttgaggcccagactcagcctgcccactggtgccggagacggagtggagtgggcctggatccgagggatgctacctctccctttcccacttgaggaccctggggagagatgggggcggggaaaatggaggtatgaatttggggtaagaggaagtgagatctccgcttgcaggtcagcccctgccttgcagggcgggctggcttgactcaggccctgtgagatagagggcccagcccagccccacccacagatcccctgctcctgttgtgttctgttgtaaatcatttggcgagactgtattttagtaactgctgcctaacttccctgtgttctatttgagaggcgcctgtctggataaagttgtcttgaaatttcaaaaaaaaaaaaaaaaaa

SEQ ID NO: 1996 - protein, 198 aa, Homo sapien
MKLYSLSVLYKGEAKVVLLKAAYDVSSFSFFQRSSVQEFMTFTSQLIVERSSKGTRASVKEQDYLCHVYVRNDSLAGVVIADNEYPSRVAFTLLEKVLDEFSKQVDRIDWPVGSPATIHYPALDGHLSRYQNPREADPMTKVQAELDETKIILHNTMESLLERGEKLDDLVSKSEVLGTQSKAFYKTARKQNSCCAIM

SEQ ID NO: 1997 - DNA, 1610 bp, Homo sapien
ggcacgagggagagaactagtctcgagtttttttttttttttttttgacaagatggcggcaggaggcagtggcgttggtgggaagcgcagctcgaaaagcgatgccgattctggtttcctggggctgcggcccacttcggtggacccagcgctgaggcggcggcggcgaggcccaagaaataagaagcggggctggcggcggcttgctcaggagccgctggggctggaggttgaccagttcctggaagacgtgcggctacaggagcgcacgagcggtggcttgttgtcagaggccccaaatgaaaaactcttcttcgtggacactggctccaaggaaaaagggctgacaaagaagagaaccaaagtccagaagaagtcactgcttctcaagaaaccccttcgggttgacctcatcctcgagaacacatccaaagtccctgcccccaaagacgtcctcgcccaccaggtccccaacgccaagaagctcaggcggaaggagcagctatgggagaagctggccaagcagggcgagctgccccgggaggtgcgcagggcccaggcccggctcctcaacccttctgcaacaagggccaagcccgggccccaggacaccgtagagcggcccttctacgacctctgggcctcagacaaccccctggacaggccgttggttggccaggatgagtttttcctggagcagaccaagaagaaaggagtgaagcggccagcacgcctgcacaccaagccgtcccaggcgcccgccgtggaggtggcgcctgccggagcttcctacaatccatcctttgaagaccaccagaccctgctctcagcggcccacgaggtggagttgcagcggcagaaggaggcggagaagctggagcggcagctggccctgcccgccacggagcaggccgccacccaggagtccacattccaggagctgtgcgaggggctgctggaggagtcggatggtgagggggagccaggccagggcgaggggccggaggctggggatgccgaggtctgtcccacgcccgcccgcctggccaccacagagaagaagacggagcagcagcggcggcgggagaaggctgtgcacaggctgcgggtacagcaggccgcgttgcgggccgcccggctccggcaccaggagctgttccggctgcgcgggatcaaggcccaggtggccctgaggctggcggagctggcgcggcggcggaggcggcggcaggcgcggcgggaggctgaggctgacaagccccgaaggctgggacggctcaagtaccaggcacctgacatcgacgtgcagctgagctcggagctgacagactcgctcaggaccctgaagcccgagggcaacatccttcgagaccggttcaagagcttccagaggaggaatatgatcgagcctcgagagagagccaagttcaaacgcaagtacaaggtgaagctggtggagaagcgggcgttccgtgagatccagttgtagctgccatcagatgccggagactcgcccttcaataaaaaatctcttctagctgaaaaaaaaaaaaaaaaaaaaaaaaaaaaaaaaaaaaaaaaaaaaaaaaaaaaaaaaaaaaaaaaaaaaa

SEQ ID NO: 1998 - protein, 478 aa, Homo sapien
MAAGGSGVGGKRSSKSDADSGFLGLRPTSVDPALRRRRRGPRNKKRGWRRLAQEPLGLEVDQFLEDVRLQERTSGGLLSEAPNEKLFFVDTGSKEKGLTKKRTKVQKKSLLLKKPLRVDLILENTSKVPAPKDVLAHQVPNAKKLRRKEQLWEKLAKQGELPREVRRAQARLLNPSATRAKPGPQDTVERPFYDLWASDNPLDRPLVGQDEFFLEQTKKKGVKRPARLHTKPSQAPAVEVAPAGASYNPSFEDHQTLLSAAHEVELQRQKEAEKLERQLALPATEQAATQESTFQELCEGLLEESDGEGEPGQGEGPEAGDAEVCPTPARLATTEKKTEQQRRREKAVHRLRVQQAALRAARLRHQELFRLRGIKAQVALRLAELARRRRRRQARREAEADKPRRLGRLKYQAPDIDVQLSSELTDSLRTLKPEGNILRDRFKSFQRRNMIEPRERAKFKRKYKVKLVEKRAFREIQL

SEQ ID NO: 1999 - DNA, 2205 bp, Homo sapien
ggcacgagggtgcggctcggggtaatagggctgctgctcggccggccggcggcggcgagcagcaggggcatgagggctaacccgggaagcggcagctgagcgggccgggaggagcgccggtccccgtggatcccgagagtgcagagctcggggcaggggccgggaggcgtgggggagccgggccctcccctcaggaacgtgtccaggggccgacccggcccgtagtgtggaagcagcttcaggtaggtgagctcgtgaaacaatatgaagaggagaaaatagccttttaaggaaattggcccacagaaaggatggccttcttggacaatccaactatcattctagctcatattcgacagtcacatgtgaccagtgatgacacgggaatgtgtgagatggttctcattgatcatgatgttgacctagagaagattcatcctccttcaatgcctggagacagtgggtcagaaattcagggaagcaatggtgagactcagggctatgtatatgcccagtcagtcgatattacctcaagttgggactttggtattagaagacgctcaaacacagctcaaagattagaacgactccgaaaagagagacaaaaccagatcaaatgcaaaaatattcagtggaaagaaagaaattctaagcaatcagcccaggagttaaagtcactgtttgaaaaaaaatctctcaaagagaagcctccaatttctgggaagcagtcgatattatctgtacgcctagaacagtgccctctgcagctgaataacccttttaacgagtattccaaatttgatggcaagggtcatgtaggtacaacagcaaccaagaagatcgatgtctacctccctctgcactcgagccaggacagactgctgccaatgaccgtggtgacaatggccagcgccagggtgcaggacctgatcgggctcatctgctggcagtatacaagcgaaggacgggagccgaagctcaatgacaatgtcagtgcctactgcctgcatattgctgaggatgatggggaggtggacaccgatttccccccgctggattccaatgagcccattcataagtttggcttcagtactttggccctggttgaaaagtactcatctcctggtctgacatccaaagagtcactctttgttcgaataaatgctgctcatggattctcccttattcaggtggacaacacaaaggttaccatgaaggaaatcttactgaaggcagtgaagcgaagaaaaggatcccagaaagtttcaggttcaagggcagacggggtttttgaggaggattcgcaaattgacatagccacagtacaggatatgcttagcagccaccattacaagtcattcaaagtcagcatgatccacagactgcgattcacaaccgacgtacagctaggtatctctggagacaaagtagagatagaccctgttacgaatcagaaagccagcactaagttttggattaagcagaaacccatctcaatcgattccgacctgctctgtgcctgtgaccttgctgaagagaaaagccccagtcacgcaatatttaaactcacgtatctaagcaatcacgactataaacacctctactttgaatcggacgctgctaccgtcaatgaaattgtgctcaaggttaactacatcctggaatcgcgagctagcactgcccgggctgactactttgctcaaaaacaaagaaaactgaacagacgtacgagcttcagcttccagaaggagaagaaatccgggcagcagtgacactggcctccagcctcaatctgttccgtagctcagagcctgcctgccagggccaagtgccctagagcccacccggtgtcctgaagtcctcggggggaggccagcccctggctcactggcacagggcaggtgggctctcggggaaggtgtcgggggccccctaggagggagcgctggggacattgccatgggacggaagtctgcttggcagtggctttgataagcgatgcttgggggtcagaccaccccctagaggagccacgtgccgcccagccaccttcaatgcctgccaccctgcccgaggatgtacagagccgtgcccacacatttccttgcaacttgatcaaatttcttaaagcaaacaacaaaaatgtacatttctgtttttccttttaataaacaggtgtactctttaaaaaaaaaaaaaaaaaaa

SEQ ID NO: 2000 - protein, 486 aa, Homo sapien
MAFLDNPTIILAHIRQSHVTSDDTGMCEMVLIDHDVDLEKIHPPSMPGDSGSEIQGSNGETQGYVYAQSVDITSSWDFGIRRRSNTAQRLERLRKERQNQIKCKNIQWKERNSKQSAQELKSLFEKKSLKEKPPISGKQSILSVRLEQCPLQLNNPFNEYSKFDGKGHVGTTATKKIDVYLPLHSSQDRLLPMTVVTMASARVQDLIGLICWQYTSEGREPKLNDNVSAYCLHIAEDDGEVDTDFPPLDSNEPIHKFGFSTLALVEKYSSPGLTSKESLFVRINAAHGFSLIQVDNTKVTMKEILLKAVKRRKGSQKVSGSRADGVFEEDSQIDIATVQDMLSSHHYKSFKVSMIHRLRFTTDVQLGISGDKVEIDPVTNQKASTKFWIKQKPISIDSDLLCACDLAEEKSPSHAIFKLTYLSNHDYKHLYFESDAATVNEIVLKVNYILESRASTARADYFAQKQRKLNRRTSFSFQKEKKSGQQ

SEQ ID NO: 2001 - DNA, 1506 bp, Homo sapien
acccgtgggcctgtggactgcagcctcggcgatcagagagtgcttgtgatttcacgtatttttgctgaactcgtaaaagagacacttggatggtggattaaccagaacactaacattctgtgaaaagtttcaaattggagaatattgaattttcaccctagtccagcagctccgctgtcacttaaatacagatgaatgaagaccccattcggaaagacacctggccagcggtccagagctgatgcaggccatgctggaagtatctgccaacatgatgaagaagaggacatcccacaaaaaacatcggagcagtgtgggtccgagcaaacctgtttcccagccccggcggaacatcgtaggctgcaggattcagcatgggtggaaagaggggaatggccctgttacccagtggaaagggaccgttctggaccaggtgcctgtaaatccttctttgtatcttataaaatacgatggatttgactgtgtttatggactagaacttaataaagatgaaagagtttctgcgcttgaagtcctccctgatagagttgcgacatctcgaatcagcgatgcacacttggcagacacaatgattggcaaagcagtggaacatatgtttgagacagaggatggttctaaagatgagtggaggggaatggtcttagcacgtgcacctgtcatgaacacatggttttacattacctatgagaaagaccctgtcttgtacatgtaccaactcttagatgattacaaagaaggcgaccttcgcattatgcctgattccaatgattcacctccagcagaaagggaaccaggagaagttgtggacagcctggtaggcaaacaagtggaatatgccaaagaagatggctcgaaaaggactggcatggtcattcatcaagtagaagccaagccctccgtctatttcatcaagtttgatgatgatttccatatttatgtctacgatttggtgaaaacatcctagatgtcatcacaaactctgccaaatttgtggaactatgaaatgtattatttgtagacataaagacttgattgctttccagtttaatgaaagcttaaatgtccctgcgaacccacaatctctgccagcagaactggttttgttctgaatagtacagattgatgtgaacacaaagcattttgtgtaaggagaacccctttcttttaaaagaagtctgtctatttcgaggggagttacaggcaagtttggtaaaagttaagctagtatcatagtcatttaaaattgtaatagatcttaaccattttccccctcaccctaactctcttattctgccgccacaatgcaagcatagtttgatgttttcgttattgccttttttgagatgtatgtatctgtatctacctatatctatatgtgtgtatacatatataatatatacacacagatacaagtgtacacacacacaccacacaccacacacaccccactggcagctttgtggattaggatgggggtgcggggtt

SEQ ID NO: 2002 - protein, 247 aa, Homo sapien
MQAMLEVSANMMKKRTSHKKHRSSVGPSKPVSQPRRNIVGCRIQHGWKEGNGPVTQWKGTVLDQVPVNPSLYLIKYDGFDCVYGLELNKDERVSALEVLPDRVATSRISDAHLADTMIGKAVEHMFETEDGSKDEWRGMVLARAPVMNTWFYITYEKDPVLYMYQLLDDYKEGDLRIMPDSNDSPPAEREPGEVVDSLVGKQVEYAKEDGSKRTGMVIHQVEAKPSVYFIKFDDDFHIYVYDLVKTS

SEQ ID NO: 2003 - DNA, 2602 bp, Homo sapien
gaagatggcggcggagcgacaggaggcgctgagggagttcgtggcggtgacgggcgccgaggaggaccgggcccgcttctttctcgagtcggccggctgggacttgcagatcgcgctagcgagcttttatgaggacggaggggatgaagacattgtgaccatttcgcaggcaacccccagttcagtgtccagaggcacagcccccagtgataatagagtgacatccttcagagacctcattcatgaccaagatgaagatgaggaggaagaggaaggccagaggttttatgctgggggctcagagagaagtggacagcagattgttggccctcccaggaagaaaagtcccaacgagctggtggatgatctctttaaaggtgccaaagagcatggagctgtagctgtggagcgagtgaccaagagccctggagagaccagtaaaccgagagttcatgtagtattgaaactctggaagagtggattcagcctggataatggagaactcagaagctaccaagacccatccaatgcccagtttctggagtctatccgcagaggggaggtgccagcagagcttcggaggctagctcacggtggacaggtgaacttggatatggaggaccatcgggacgaggactttgtgaagcccaaaggagccttcaaagccttcactggcgagggtcagaaactgggcagcactgccccccaggtgttgagtaccagctctccagcccaacaggcagaaaatgaagccaaagccagctcttccatcttaatcgacgaatcagagcctaccacaaacatccaaattcggcttgcagacggcgggaggctggtgcagaaatttaaccacagccacaggatcagcgacatccgactcttcatcgtggatgcccggccagccatggctgccaccagctttatcctcatgactactttcccgaacaaagagctggctgatgagagccagaccctgaaggaagccaacctgctcaatgctgtcatcgtgcagcggttaacataaccgcccagccagctgcctggcctccctcctgtgtttcccatggccagtggccatgccccatggggatcgcccctcctgcccccttgtgcacacccagcagtccagtgcaacgtctcctccatagctctgggttcttagatcttggttggacgtttgttttctccttagttgcatttcctgggtttttgtgatgatcaatggactttaatgaaaaaaaaataaaaacaaccaaaaaaattgaaggaatatcaccagcatgttgtacggaaactctcccactgaagcaggctttaattgctttaaaattatatttatcttggggcctgtgggaggaaacttccttccatcttctctgcataaaaacttgtggcacacaatgcttattcactagtgtgtcccacccgccagccccacagatgactggaggaaggaggggaaatgtgtagaaagaggcttcgccaccacttgttcccacgagaatatatcacttgcccagataaaactgggcggcagccagagttccctgaagtgggaagtcagagctacatgcacacagtgtcttcagaaggtgaaaataaatatttccctgtgctccttttactcaacccctggggtatctaatcttgccaggtcttggccagttgagattctgttccacctgcctgcctggccctttcctccattaccatccagactgctcgcctcctggggattctcaggggctccattatggcttgatttactccacgtgcagaagtcttgagtggacctaggaggtaggtgggatattttttttcactaggatacagctcatgccaacccatcctaagtgagttcagaatcagggtatcttgccctaaaagataaacagtcaaaatgccaccgagctgttcactagtgatgtgtggcaaatcaaatcaactgttgaagaaggggtgagttttctgtgctacaagcacctgtcactgttggtacttgcaggaggcttctgctgggtatgttttggaagtgagtgtcactacttggctttgcttagcaggttctgcttcacacttgttctttgacctgctgacttgtgacttgcagaaacataggcagtagtcctagcctggtaaagaccctccaccacccctataagtttgattgctatgcaggtttgggagaggaggcctattgggctcttggatggaaccctttcccgtattaaacaaaccagagacagaatcagtgctgactcaggatctcctggtttggaatcgtaatgtgcctcaatcctctttccaagcaggcctcaccagtctctttctctttcctgcttcacccctgcaatgagccaagaaccaacactacatccacctagaactgcagaagggcttgtggtttcaaccaagacccatcctgagcaagggacttggcttggtgcttttgatcccaaagttcccacaccggcagtggcctgctggggcaatggcatctgtcacggtgttttctccagcaggtggagattatggaacctacatatgggtctggaaaaactgtacactgttgtcaccttgaccattaaaaaccagaatgagg

SEQ ID NO: 2004 - protein, 339 aa, Homo sapien
MAAERQEALREFVAVTGAEEDRARFFLESAGWDLQIALASFYEDGGDEDIVTISQATPSSVSRGTAPSDNRVTSFRDLIHDQDEDEEEEEGQRFYAGGSERSGQQIVGPPRKKSPNELVDDLFKGAKEHGAVAVERVTKSPGETSKPRVHVVLKLWKSGFSLDNGELRSYQDPSNAQFLESIRRGEVPAELRRLAHGGQVNLDMEDHRDEDFVKPKGAFKAFTGEGQKLGSTAPQVLSTSSPAQQAENEAKASSSILIDESEPTTNIQIRLADGGRLVQKFNHSHRISDIRLFIVDARPAMAATSFILMTTFPNKELADESQTLKEANLLNAVIVQRLT

SEQ ID NO: 2005 - DNA, 1833 bp, Homo sapien
ggcacgagtgggagtacaggactcgcctcctcagggttccctgtgctgccacttttcagccatggccacaagtgaacagagtatctgccaagcccgggcttccgtgatggtctacgatgacaccagtaagaaatgggtaccaatcaaacctggccagcagggattcagccggatcaacatctaccacaacactgccagcaacaccttcagagtcgttggagtcaagttgcaggatcagcaggttgtgatcaattattcaatcgtgaaagggctgaagtacaatcaggccacgccaaccttccaccagtggcgagatgcccgccaggtctacggcttaaactttgcaagtaaagaagaggcaaccacgttctccaatgcaatgctgtttgccctgaacatcatgaattcccaagaaggaggcccctccagccagcgtcaggtgcagaatggcccctctcctgatgagatggacatccagagaagacaagtgatggagcagcaccagcagcagcgtcaggaatctctagaaagaagaacctcggccacagggcccatcctcccaccaggacatccttcatctgcagccagcgcccccgtctcatgtagtgggcctccaccgccccccccacccccagtcccacctccacccactggggctaccccacctcccccacccccactgccagccggaggagcccaggggtccagccacgacgagagctccatgtcaggactggccgctgccatagctggggccaagctgagaagagtccaacggccagaagacgcatctggaggctccagtcccagtgggacctcaaagtccgatgccaaccgggcaagcagcgggggtggcggaggaggcctcatggaggaaatgaacaaactgctggccaagaggagaaaagcagcctcccagtcagacaagccagccgagaagaaggaagatgaaagccaaatggaagatcctagtacctccccctctccggggacccgagcagccagccagccacctaactcctcagaggctggccggaagccctgggagcggagcaactcggtggagaagcctgtgtcctcgattctgtccagaaccccgtctgtggcaaagagccccgaagctaagagcccccttcagtcgcagcctcactctaggatgaagcctgctgggagcgtgaatgacatggccctggatgccttcgacttggaccggatgaagcaggagatcctagaggaggtggtgagagagctccacaaggtgaaggaggagatcatcgacgccatcaggcaggagctgagtgggatcagcaccacgtaaggggccggcctcgctgcgctgattcgtcgagcccatccggcgacagaggacagccagaagcccagccagccccagactccagtgcaccagagcacgcacaggagcctgggcgcgctgctgtgaaacgtcctgacctgtgatcacacatgacagtgaggaaaccaagtgcaactcctgggtttttttagattctgcctgacacggaacaccaggtctgctcgtcttttttgtgttttatatttgcttatttaaggtacatttctttgggtttctagagacgcccctaagtcacctgcttcattagacggtttccaggttttctcccaggtgacgctgttagcgcctcagctggcggtgacagccggcccagcgtggcgccaccacacaccgcagagctgtccaggcacagctccgtccccagcgctcatggtgttgaaactgtctgtcatgcaccacggtgtctgtgtccacacagtaataaacggtttactgtccgcaaaaaaaaaaaaaaaaaa

SEQ ID NO: 2006 - protein, 418 aa, Homo sapien
MATSEQSICQARASVMVYDDTSKKWVPIKPGQQGFSRINIYHNTASNTFRVVGVKLQDQQVVINYSIVKGLKYNQATPTFHQWRDARQVYGLNFASKEEATTFSNAMLFALNIMNSQEGGPSSQRQVQNGPSPDEMDIQRRQVMEQHQQQRQESLERRTSATGPILPPGHPSSAASAPVSCSGPPPPPPPPVPPPPTGATPPPPPPLPAGGAQGSSHDESSMSGLAAAIAGAKLRRVQRPEDASGGSSPSGTSKSDANRASSGGGGGGLMEEMNKLLAKRRKAASQSDKPAEKKEDESQMEDPSTSPSPGTRAASQPPNSSEAGRKPWERSNSVEKPVSSILSRTPSVAKSPEAKSPLQSQPHSRMKPAGSVNDMALDAFDLDRMKQEILEEVVRELHKVKEEIIDAIRQELSGISTT

SEQ ID NO: 2007 - DNA, 1362 bp, Homo sapien
gggggggaggactgggtgcgcctgcagggatcggaagccggttggggtgtgagaggttttctcgctctagggagattcttcaagcaatcactatgtcaacagacacaggtgtttcccttccttcatatgaggaagatcagggatcaaaactcattcgaaaagctaaagaggcaccattcgtacccgttggaatagcgggttttgcagcaattgttgcatatggattatataaactgaagagcaggggaaatactaaaatgtccattcatctgatccacatgcgtgtggcagcccaaggctttgttgtaggagcaatgactgttggtatgggctattccatgtatcgggaattctgggcaaaacctgagccttagaagaagagatgctgtcttggtcttgttggaggagcttgctttagttagatgtcttattattaaagttacctattattgttggaaataaactaatttgtatgggtttagatggtaacatggcattttgaatattggcttcctttcttgcaggcttgatttgcttggtgaccgaattactagtgactagtttactaactaggtcattcaaggaagtcaagttaacttaaacatgtcacctaaatgcacttgatggtgttgaaatgtccaccttcttaaatttttaagatgaacttagttctaaagaagataacaggccaatcctgaaggtactccctgtttgctgcagaatgtcagatattttggatgttgcataagagtcctatttgccccagttaattcaactttcgtctgcctgttttgtggactggctggctctgttagaactctgtccaaaaagtgcatggaatataacttgtaaagcttcccacaattgacaatatatatgcatgtgtttaaaccaaatccagaaagcttaaacaatagagctgcataatagtatttattaaagaatcaccaactgtaaacatgagaataacttaaggttctagtttagttttttgtaattgcaaattatatttttgctgctgatatattagaataattttaaaatgtcatcttgaaatagaaatatgtattttaagcactcacgcaaaggtaaatgaacacgttttaaatgtgtgtgttgctaattttttccataagaattgtaaacattgaactgaacaaattacctataatggatttggttaatgacttatgagcaagctggtttggccagacagtatacccaaacttttatataatatacagaaggctatcacacttgtgaaattctcttgtctaatctgaatttgcattccatggtgttaacatggtatatgtattgttattaaagtaagtgacccatgaaaaaaaaaaaaaaaaaaaa

SEQ ID NO: 2008 - protein, 93 aa, Homo sapien
MSTDTGVSLPSYEEDQGSKLIRKAKEAPFVPVGIAGFAAIVAYGLYKLKSRGNTKMSIHLIHMRVAAQGFVVGAMTVGMGYSMYREFWAKPEP

SEQ ID NO: 2009 - DNA, 2944 bp, Homo sapien
atatgatccgctcggcttcctgggtctggctgctgccgcccgccggtgtccgcccgtgtcgcgccggggcaccaaggagccgttggagggtccgggcggaggcccgctcgtgtggaagtcgtcgacgccgccgctcgtccgtcctcccgtccgttctcgctcccggccgccatcatgctggcgctcatctcccgcctgctggactggttccgttcgctcttctggaaggaagagatggagctgacgctcgtggggctgcagtactcgggcaagaccaccttcgtcaatgtcatcgcgtcaggtcaattcagtgaagatatgatacccacagtgggcttcaacatgaggaaggtaactaaaggtaacgtcacaataaagatctgggacataggaggacaaccccgatttcgaagcatgtgggagcggtattgcagaggagtcaatgctattgtttacatgatagatgctgcagatcgtgaaaagatagaagcttcccgaaatgagctacataatcttctagataaaccacagttacaaggaattccagtgctagtgcttggaaacaagagagatcttcctaatgccttggatgagaaacagctaattgaaaaaatgaatctgtctgctattcaggatagagaaatttgctgctattcaatttcttgcaaagaaaaggataatatagatatcacacttcagtggcttattcagcattcaaaatctagaagaagctgaagcatctcttgaagtcttccagtccttcttggctataatcctagaattattgtccgttcctctgaagtaattcccagaatacggtccttcctaaaccccagaaattgcctttttcagagtctatttctcatgtgcactgctgaagatgaatatccctaatccttcataaagaatcagctagagttgtcatgataaagtcagcacacacaaaaaggcttcttacacataccaaaaaaaatgtcttaaaccatgtgtagagctttaaaaacagaaaaaaaaccccatatacttatgaccatcttaaatcaagaaaattgcatatttccattctggtctttctgggccagatttttatattggttttcagtaaatgtctatctataatatttcattatagagtccagtagcttaatactgacactgacttgatacagcacgaagtttctagtgccacacacagtatttagaaaacctttaggcgtgaatgactcatgtgggatatatgtaaacataatgtttattttatctcacaaatgcatgtgaaatgtataattacatcttaggaatccaaaatggtctgcagagagtgagcggaggcaccagatcaatgttggttctttgcactggtgagattctgcctgatgaatattaaagatatcctgctttctgagaactctatcaccagatggcagttgggatatgggaggaactaaagcatcctgttttgtatctgtccagatcattatttctgtctcttgttttttcttcctggttcaggatacttttttaaggggttgagaattgaagattttccaaaagcgttcatgaatttagagcattccacccaatataataaaacctgttaagaatgtcagtctttgttcaaacatctgtttgttctatctccagtcattaaatcagtgctgctgcatgacactcttaactcctgactttttatatccagtcataaagttgactttcagcacaaaagatacttataaacaaataaaaaatttttatttttctctcttactgatgtaagctttggcactcttttgactggtgccattagacatcttgattattgtgacaactctagacctgcctgctttatctaatgtaatcatgctcaatgtctacaggttgtttaataatcagtcacacagagaactgaggaactgatgctgtttgtttgcttctatgatacagagatgtctaaaaacttcaaatggacatgttttgtagtttagcgacttccgtatacataaagggacatattaatactggttcatttgtaaattattattcatatagaccactgtagtagataaaactctatggtacacctgcttatgtgttgcctcacactgtgtgtgattttgtttcttttgttaagcagcacttatgtagactgcatttccaaatgtgttgagcactcggagtgtagtcaacagtaagttcttttaatgaatatcagttttaatttatagactgccatggccttaaaaatattctgtacaatatactgcactgtgttgcacagacactacttgcttttctccattcatatttttatgagtagaatctgggcttttaaatttctcttcttattctttgaagcatgttgcatactaccctggtgggatggatggttctgtaaatgaagggatatttaaacttgctactgttgttcaacaccattaatggtcagtgtgaaccattacaaagaatgtggcaacttgcttgtgcctaaaaggaggaattggaactagaatgtgtgactctgtggggactgcataggtttgttaattgacctatagctaaaccttaatgtgtttgtgtgtctatacattgctttccgcatttcaagacatccagacgctattaccaacattttcctgtgcattaacctctgcatgtgaaaacttttaacagttactgaactatgtaaatatgtgaatttttttatttaggtggatgcattttttgtctgtttactgctcttctcagctttattcaataaacttgcattttaagggttgtattggcaattttaacttaaaatgtgcatcatgatggaaggtgcagacttttttggaagtttccgagaggagggtctatagaccatttgtcagaaatcagatcagccctcaaagaatggggtctgtgggctagttaaaatagaaataaacttttaaaatatccacag

SEQ ID NO: 2010 - protein, 186 aa, Homo sapien
MLALISRLLDWFRSLFWKEEMELTLVGLQYSGKTTFVNVIASGQFSEDMIPTVGFNMRKVTKGNVTIKIWDIGGQPRFRSMWERYCRGVNAIVYMIDAADREKIEASRNELHNLLDKPQLQGIPVLVLGNKRDLPNALDEKQLIEKMNLSAIQDREICCYSISCKEKDNIDITLQWLIQHSKSRRS

SEQ ID NO: 2011 - DNA, 6702 bp, Homo sapien
ccccgactagcccgacagtccccgactagcccgacagccccagcaggatctgcatcgtcatcgagccggcccagcttctgaagggagatgtcatggtgaaatgctaccacaagaaataccgctcggccacccgtgacgtcattttccgcctgcagtttcacactggggctgtgcagggctacgggctggtgtttgggaaggaggatctggacaatgccagcaaagatgaccgttttcctgactatgggaaggttgaattagtcttctctgccacgcctgagaagattcaagggtccgaacacttgtacaacgaccacggtgtgattgtggactacaacacaacagacccactgatacgctgggactcgtacgagaacctcagtgcagatggagaagtgctacacacgcagggccctgtcgatggcagcctttacgcgaaggtgaggaagaaaagctcctcggatcctggcatcccaggtggcccccaggcaatcccggccaccaacagcccagaccacagtgaccacaccttgtctgtcagcagtgactccggccactctacagcctctgccaggacggataagacggaagagcgcctggccccaggaaccaggaggggcctgagtgcccaggagaaggcagagttggaccagctgctcagtggctttggcctggaagatcctggaagctccctcaaggaaatgactgatgctcgaagcaagtacagtgggacccgccacgtggtgccagcccaggttcacgtgaatggagacgctgctctgaaggatcgggagacagacattctggatgacgagatgccccaccacgacctgcacagtgtggacagccttgggaccctgtcctcctcggaagggcctcagtcggcccacctgggtcccttcacctgccacaagagcagccagaactcactcctatctgacggttttggcagcaacgttggtgaagatccgcagggcaccctcgttccggacctgggccttggcatggacggcccctatgagcgggagcggacttttgggagtcgagagcccaagcagccccagcccctgctgagaaagccctcagtgtccgcccagatgcaggcctatgggcagagcagctactccacacagacctgggtgcgccagcagcagatggttgtagctcaccagtatagcttcgccccagatggggaggcccggctggtgagccgctgccctgcagacaatcctggcctcgtccaggcccagcccagagtgccactcacccccacccgagggaccagcagtagggtggctgtccagaggggtgtaggcagtgggccacatccccctgacacacagcagccctctcccagcaaagcgttcaaacccaggtttccaggagaccaggttgtgaatggagccggcccagagctgagcacaggcccctccccaggctcgcccaccctggacatcgaccagtccatcgagcagctcaacaggctgatcctggagctggatcccaccttcgagcccatccctacccacatgaacgccctcggtagccaggccaatggctctgtgtctccagacagcgtgggaggtgggctccgggcaagcagcaggctgcctgacacaggagagggccccagcagggccaccgggcggcaaggctcctctgctgaacagcccctgggcgggagactcaggaagctgagcctggggcagtacgacaacgatgctggggggcagctgcccttctccaaatgtgcatggggaaaggctggtgtggactatgccccaaacctgccgccattcccctcaccagcggacgtcaaagagacgatgacccctggctatccccaggacctcgatattatcgatggcagaattttaagtagcaaggagtccatgtgttcaactccagcatttcctgtgtctccagagacaccgtatgtgaaaacagcgctgcgccatcctccgttcagcccacctgagcccccgctgagcagcccagccagtcagcacaaaggaggacgtgaaccacgaagctgccctgagacgctcactcacgctgtggggatgtcagagagccccatcggacccaaatccacgatgctccgggctgatgcgtcctcgacgccctcctttcagcaggcttttgcttcttcctgcaccatttccagcaacggccctgggcagaggagagagagctcctcttctgcagaacgccagtgggtggagagcagccccaagcccatggtttccctgctggggagcggccggcccaccggaagtcccctcagcgctgagttctccggtaccaggaaggactccccagtgctgtcctgcttcccgccgtcagagctccaggctcctttccacagccatgagctgtccctagcagagccaccggactccctggcgcctcccagcagccaggccttcctgggcttcggcaccgccccagtgggaagtggccttccgcccgaggaggacctgggggccttgctggccaattctcatggagcgtcaccgacccccagcatcccgctgacagcgacaggggctgccgacaatggcttcctgtcccacaactttctcacggtggcgcctggacacagcagccaccacagtccaggcctgcagggccagggtgtgaccctgcccgggcagccacccctccctgagaagaagcgggcctcggagggggatcgttctttgggctcagtctctccctcctccagtggcttctccagcccgcacagcgggagcaccatcagtatccccttcccaaatgtccttcccgacttttccaaggcttcagaagcggcctcacctctgccagatagtccaggtgataaacttgtgatcgtgaaatttgttcaagacacttccaagttctggtacaaggcggatatttcaagagaacaagccatcgccatgttgaaggacaaggagccgggctcattcattgttcgagacagccattccttccgaggggcctatggcctggccatgaaggtggccacgcccccaccttcagtcctgcagctgaacaagaaagctggagatttggccaatgaactcgtccggcactttttgatcgagtgtaccccgaagggagtgcggttgaaagggtgctcgaatgaaccatatttcgggagcctgacggccttggtgtgccagcattccatcacgcccttggccttgccgtgcaagctgcttatcccagagagagatccattggaggaaatagcagaaagttctccccagacggcagccaattcagcagctgagctgttgaagcagggggcagcctgcaacgtgtggtacttgaactctgtggagatggagtccctcaccggccaccaggcgatccagaaggccctgagcatcaccctggtccaggagcctccacctgtgtccacagttgtgcacttcaaggtgtcagcccagggcatcaccctgacagacaatcagaggaagctcttcttccggaggcattaccccgtgaacagtgtgattttctgtgccttggacccacaagacaggaagtggatcaaagatggcccttcctcaaaagtctttggatttgtggcccggaagcagggcagtgccacggataatgtgtgccacctgtttgcagagcatgaccctgagcagcctgccagtgccattgtcaacttcgtatcaaaggtcatgattggttccccaaagaaggtctgagaactcccctccctccctggacccaccgatgcctctcgaagccctggagacagccgttgggtgagggtggggcccccactttttaccaaactagtaaacctgacattccaggcccatgaggggaaagaggatcttccagctctgcaaaaacaagaacaaacaacatcaccgtgaattggcctttcctgaaagtgacttatctgacacatctctgtagccacatgctttttgggtagaagaagctgggcatgggtgcaccccaccccctagggtccccatgggaaagggacatgcaaggaaacagcacagaacacgaggtggtccccatgtccctggcacactagcattccgggggatgaggaatccccagcccttgaggcagaggtgccgagtgactgccatgcttcgcccgtccgcatgggcgcttctgtccagctgcacccgaggccgggggtttccctcacctcggtcttcccaagatggagatgctaacgaaactgagaagggggcgtatgtttgacgaaggtttgtgcaagtcaggcccttctggaacacagcagggcctacaacgaggggcctttgcgatgggctgtgaggatgggggtggtgggaagaattggccacgttagagaccccatgccaccccaccatggtgagtgctctgtgcctcctgctcacctgtggtgagctgggcgagctgggcgagctgggcgagctgggctggggagagcctgtgaggaccgagaggagaaatgagaagaaggaacaaaaatattatttctatgtaatttatattttacttatgccaaattatttatgataatttgccattgctatactgtaccagtgtcaaatgctgcagcctgccaagctgtgattttgtgaggcttgtccctatgtaggatgcaccgcaggcccctggccactgaaagagtgtgcagtggactgtgggtctcccatatgcggtgccgcccaaaggtggctttgcctcaagcaacctaccctgatgttttactcattggaatgtttttccccgattgtggatgacttcttttctgatggagagagtccaggagggatggaaaactcctggatttaagctcagcatcccccacatgggcttttcgatcatcttcaggcctgaagctgcacgacctgaagttcgcctgcatttatcagccctctttgtgctgctccttgccaccttggggttcctgctggggaccatgtgtggttgtggcatgtgtgagcagaagggaggatgaggaaaaagagaagaaaccccggtactgacaagctgtttttgagtgccactgtttgccatcatctaagccactgaatcaagtgtatttcaggcttatttcaacattccaatgccctggttttcctgcttgaatctgttcgtggtcaaaggtttgggggaatttgtgaccctggaacatccccagagtgaaagatggagctgggccacatcagaataaggccttggccccatcctctcacagcctaggtgctctgcaggcatgctgactgtcctgattgcgatccagcccgaaattccctcctctgctttcaaaagtcaaatcccccattcttaggccacactggtgtcacaagctcctgtcagggagctggggtttgggaatgtgctttgtgaactctgctttaaagtgaggggccgaggaaaacttagaaacaggcagagttggaagcagccaaatcacagtgggtgttgtgtgtgtgtgcgtgtgtgcatgcgtgcgtgtatgcgtgtgtgaaagcaggtggaccattccactttttagctcctattgatgcaccaaaccaagtgcctcatttctgtgccaaatgtttgccttggtcgttgtggacctccttctctaacttgcggtggcatgactgtcaggaggtgctggcattttcagcagatcctcatgtgttgaccctgatgtctttagcagaggcctctagcatctcggtttttcatccactgcaggaatgtggccacagggagcagaggtttgtactttccccaagaggtcctcatcctgagacggtctctacccatgtttaacccaaagagtgcaggccaggttccttatccttctgatgaaggatgagagagctcatttagaagtcagagcaaactagggtctcagtattgagaaacgcagcctgccagggaatcacagagacatcggggtgcccgcgatggccctcatgaagccatgcctcgacggcattcaggaagccctgcaaacgtgctttttgaactcattggccaggtgtgatttttacacaaggtaaacgtggtcaagggcatcggggaatttgctccaagcagatagctccctctgaggaaccaaaggaagcaagtttccacgatttctgaagagctggtataggaagtttctttcttccttttgtgttacatgtgcattaaacagaacaagctgtgtgtcatcacagattgtactgtgggctcagaaaccgtgagagagcccccaccgtggacaccggctctagggccacaggaaaaggaacgtttccaggcattttgtctccagggctcccgctggacaggcacgtactgccctggggagtaaatgcggagagttcacgaactgtgcccaacgcatgttatagccagggtcctactaactactcagtaaaagaacgtattgttgtattcctccagtgttaagctatagccatgttaaaagtcactgtgcatttattctcagcatcaaataccttgtaacgtcttctctgccttgttagtgcatatttttacttttctgatactgtaaagaatatatccagtatgtaaatgaatgttctataaatcttttgtatagtcattttctctgctccttaaatatcatctctattcagagtataataaaattatgaacttggtaaaaaaaaaaaaaaaaaaaaaaaaaaaaaaaaaaaaaaaaaaaaaaaaaaaaaaaaaaaaaaaaaaaaaaaa

SEQ ID NO: 2012 - protein, 1205 aa, Homo sapien
MVKCYHKKYRSATRDVIFRLQFHTGAVQGYGLVFGKEDLDNASKDDRFPDYGKVELVFSATPEKIQGSEHLYNDHGVIVDYNTTDPLIRWDSYENLSADGEVLHTQGPVDGSLYAKVRKKSSSDPGIPGGPQAIPATNSPDHSDHTLSVSSDSGHSTASARTDKTEERLAPGTRRGLSAQEKAELDQLLSGFGLEDPGSSLKEMTDARSKYSGTRHVVPAQVHVNGDAALKDRETDILDDEMPHHDLHSVDSLGTLSSSEGPQSAHLGPFTCHKSSQNSLLSDGFGSNVGEDPQGTLVPDLGLGMDGPYERERTFGSREPKQPQPLLRKPSVSAQMQAYGQSSYSTQTWVRQQQMVVAHQYSFAPDGEARLVSRCPADNPGLVQAQPRVPLTPTRGTSSRVAVQRGVGSGPHPPDTQQPSPSKAFKPRFPGDQVVNGAGPELSTGPSPGSPTLDIDQSIEQLNRLILELDPTFEPIPTHMNALGSQANGSVSPDSVGGGLRASSRLPDTGEGPSRATGRQGSSAEQPLGGRLRKLSLGQYDNDAGGQLPFSKCAWGKAGVDYAPNLPPFPSPADVKETMTPGYPQDLDIIDGRILSSKESMCSTPAFPVSPETPYVKTALRHPPFSPPEPPLSSPASQHKGGREPRSCPETLTHAVGMSESPIGPKSTMLRADASSTPSFQQAFASSCTISSNGPGQRRESSSSAERQWVESSPKPMVSLLGSGRPTGSPLSAEFSGTRKDSPVLSCFPPSELQAPFHSHELSLAEPPDSLAPPSSQAFLGFGTAPVGSGLPPEEDLGALLANSHGASPTPSIPLTATGAADNGFLSHNFLTVAPGHSSHHSPGLQGQGVTLPGQPPLPEKKRASEGDRSLGSVSPSSSGFSSPHSGSTISIPFPNVLPDFSKASEAASPLPDSPGDKLVIVKFVQDTSKFWYKADISREQAIAMLKDKEPGSFIVRDSHSFRGAYGLAMKVATPPPSVLQLNKKAGDLANELVRHFLIECTPKGVRLKGCSNEPYFGSLTALVCQHSITPLALPCKLLIPERDPLEEIAESSPQTAANSAAELLKQGAACNVWYLNSVEMESLTGHQAIQKALSITLVQEPPPVSTVVHFKVSAQGITLTDNQRKLFFRRHYPVNSVIFCALDPQDRKWIKDGPSSKVFGFVARKQGSATDNVCHLFAEHDPEQPASAIVNFVSKVMIGSPKKV

SEQ ID NO: 2013 - DNA, 3163 bp, Homo sapien
cctttgccctgaagggggctggatgggcaaggcggccgcgatggctcgagctcgggcggtggcggcggtggccggaggcggcggtgcctcctcctcctcgccccggcgccggcggtgatccgagcgagcggccgcggcccccgatgagactgctggcgggctggctgtgcctgagcctggcgtccgtgtggctggcgcggaggatgtggacgctgcggagcccgctcacccgctccctgtacgtgaacatgactagcggcccgggtgggccggcggcggccgcgggcggcaggaaggagaaccaccagtggtatgtgtgcaacagagagaaattatgcgaatcactccaggctgtctttgttcagagttaccttgatcaaggaacacagatcttcttaaacaacagcattgagaaatcgggctggctatttatccaattatatcattcttttgtgtcatctgtttttagcctgtttatgtctagaacatctatcaatgggttgctaggaagaggctcaatgtttgtgttttcaccagatcagtttcagagactgcttaaaattaatccagactggaaaacccacagacttcttgatttaggtgctggagatggagaagtcacaaaaatcatgagccctcattttgaagaaatctatgccactgagctttctgaaactatgatatggcagcttcagaaaaagaaatacagagtccttggtataaatgaatggcagaatacggggttccagtatgatgtcatcagctgcctgaacttgctggaccgctgtgatcagcccctgactttgttaaaagatatcagaagtgtcttggagccaactagaggcagggtcatccttgcccttgtcctcccctttcatccctatgtggaaaacgtaggtggcaagtgggagaaaccatcagaaattttggaaatcaaaggacagaactgggaagaacaagtgaatagtctgcctgaagttttcagaaaagctggttttgttatcgaagctttcaccagactaccatacctgtgtgaaggcgacatgtataatgactactacgttctggatgacgctgtctttgttctcaaaccagtataaacacgtggaggtcgaagtcttcagagtccgcaccctccgggatgtgcccttggaagagggtctgtgttcacaattacgtgaagggaggacccttggggaccgccattctaaatatcatgtaggaatttaaaaagccaaaatactaattatttctttgtagtgtgtaaaggaatgtttttaaaagacaaaaacccaactctttgtggatttttatcaactctttactcagagccactctccaatgcaggtcacactccaattatgatggaagatattttttatacttaattgcagtagggactcattcccagacaaagcaatagtcacgacttcatggaaccaatcaatggattgttttttgaagactggcaataaagctgtccattcaattccaaatactggttttaaggtatagccactgatattctttcatgtttagaaattctttctgttattattcaagaaaatgtttttaatcatgctaataaacttttttggagatgactttggcatcatgtttgaattcatataaagctcccctagcattttttattggtttggcttcaggagtacccaaatagtagcattatgagaatgacgcagacaatttgaataggggggaaggaaggcttcagacttgggggaaggggagattattgcaaattgcagtgaacactgagtcagtaaaaaaaaaaaacagaaacaaaaacccagcctcattcagatacagaacttcagggacccctccccccacccccccagttaatgctgctgtgaaaaatgcaaaataacctggttctgactttgtgatcactcatgtcccatacactgaactttgtttttttctggacaatctcaggttctcagaattgaaacattcagttttgtctactgacaaaatgcaactaaaaatgttttaattcaacttcttactctacacttatatacctctctcccagagcttggctcttccctgaaatccttaaaggagtttattatttgccaagaatatggtttgatgaagaccgtgtcagactcatgcattctggaatccgtgagtgcctccaaccataaacccagaaatgctgccatagaggaacccattagcaagatcaataaccatcgtggatattccaaagagcagagcatttaacccagaatctgaaatctcagtaataacagaaatgtcaatatgagattgtggttattaacaatatgttatcctcactactttatttcttttttcatccaggtgtttcattaagtattctcatttatatgctcatagaagtcatcagatcaacacattcactccaacacctgggtataaaggcgaattaaaacctgaagaattactttattattcattaagaactgcattcccacatcctcacaccaatatcttccactgttactgtgcagtcataataagagttgggttatgtgatttatgcaaaattgttattggtgtgttctaatgatttttttccaggaattcaagtaagtgaagtacaaatacttagcaccatagattgtaaaaatagaaagaggaaatgagaaaacttaatgtcgttcttgtacagttgagttttgcttctttataaactgtctgttaaaatcaggggttgctgttagactgtcaagcagaagtgatggatgttcaaggaggcaggttgccccaaagtgttttctaactttcaagtagagaactttatgctctaataagaaaaatacaactcattcttaaccacccccccaaaacagagaaaacacatacatttatgcattttaaagataaaaagtagtttctcaaaaaaatctgaagttctctgaaaaccagcttattaaaagtgctgttttgtggtgaaaattgaaaccaaatccactcacatttcctatcgggtcttgaaattcttggtggtgtgtcaccattccactagatggcagtgttgcttactgagtgtcaatggcttttttccccgtaaatggaatcatgtttttctcccccaaagtacaataaagctgccttgtctgcaccaaaaacaaaaaaaaaaaaaaaaaaa

SEQ ID NO: 2014 - protein, 283 aa, Homo sapien
MTSGPGGPAAAAGGRKENHQWYVCNREKLCESLQAVFVQSYLDQGTQIFLNNSIEKSGWLFIQLYHSFVSSVFSLFMSRTSINGLLGRGSMFVFSPDQFQRLLKINPDWKTHRLLDLGAGDGEVTKIMSPHFEEIYATELSETMIWQLQKKKYRVLGINEWQNTGFQYDVISCLNLLDRCDQPLTLLKDIRSVLEPTRGRVILALVLPFHPYVENVGGKWEKPSEILEIKGQNWEEQVNSLPEVFRKAGFVIEAFTRLPYLCEGDMYNDYYVLDDAVFVLKPV

SEQ ID NO: 2015 - DNA, 2393 bp, Homo sapien
ggccggcgcctcctcctggattcattcactcgctcttttcattcacgaaggtagtgaggcctagtggaaagccatggagagcgctctccccgccgccggcttcctgtactgggtcggcgcgggcaccgtggcctacctagccctgcgtatttcgtactcgctcttcacggccctccgggtctggggagtggggaatgaggcgggggtcggcccggggctcggagagtgggcagttgtcacaggtagtactgatggaattggaaaatcatatgcagaagagttagcaaagcatggaatgaaggttgtccttatcagcagatcaaaggataaacttgaccaggtttccagtgaaataaaagaaaaattcaaagtggagacaagaaccattgctgttgactttgcatcagaagatatttatgataaaattaaaacaggcttggctggtcttgaaatcggcatcttagtgaacaacgtgggaatgtcgtatgagtatcctgaatactttttggatgttcctgacttggacaatgtgatcaagaaaatgataaatattaatattctttctgtttgtaagatgacacaattggtactgcctggcatggtggaaagatccaaaggggctattctgaacatttcatctggcagtggcatgctccctgtcccactcttgaccatctattctgcaaccaagacttttgtagatttcttctctcagtgcctccatgaggagtataggagcaagggcgtctttgtgcagagtgtcctgccatacttcgtagctacaaaactggctaaaatccggaagccaactttggataagccctctccggagacgtttgtgaagtctgcaattaaaacagtcggcctgcaatcccgaaccaatggatacctgatccatgctcttatgggctcgataatctcaaacctgccttcttggatttatttgaaaatagtcatgaatatgaacaagtctacacgggctcactatctgaagaaaaccaagaagaactaagcatgataactgcattgtaacttggccagatgctccagcatatgcacgttcactgcaaagcaccctactggttttgaaaatctgaccttgtcatttcaatagttattaacatgactaaatattatcttaattaagaggaaaatagaagttgcttttaggggtttctgacatatattctggatactatccgaggtaattttgaagtttaatataaatgctcatatcaaatgaatatagaactaatattgtcgggaacacctaatagaaaggaatactattatagcaaatcacagaatgatagactcaagcataaaacttggcagttttatctgcttcaaaatgccattgatcattattcctgtattttctctgaaactgattataaaaaccaatgtccagctactcttttgtttttgacacttgaagaaatggagatcgatttgatttgtttataagcagacacactgcaatttacaaagatctctttacggttttataaaattatcttccagtttgtacatttatatggaattgttctttatcaagggtagctaatgacatgaaaataattgtgaaatatggaattatttctgacacatgaagcccactaaactatgctttcctataatgcatatttcttctcagtttaaatgtatgtaaatatcgaagctatatggtatgatttataaagataaatgggccaaagtgtacattgagactggcagccatctatggtaccactgaaaccctgacccagaaaagtggcttgcttggacacccagctgcctttgtttctgcattaaaccaatattgatcacacatatgacacaggctagtcctataaaagtaatgacttcatagaaatggcattataatttttaagttgatactctacaggtagctattgatataattagttttaataaaacatgctgcaaccatggtatacaacaaaaatacatttctttggtgattgaaattaaggccgtatttacaatgacttaatataagactgacttttatcctgcttcataacttgtatggagaactcaccaagaaagaattcaatactgtgaaatatgcagcaagaagattggtctttacctaggctgtgtttcctaagctctgagttttcagcaccagtagatttgtattaaaagaaaaaaaaatggggccttagcttctggcttttaattttgccagctaaggacataaaacaaaaataaacaaacaaaaacaaatagccatctgctatcagcatcattatgtaaaagaaaatatattttagcccctaaaattaggaagaatgtaatctcagaataaaggttgtcatttaagttgaataaatatatagctttatgaaaaacacaaaaaaaaaaaa

SEQ ID NO: 2016 - protein, 312 aa, Homo sapien
MESALPAAGFLYWVGAGTVAYLALRISYSLFTALRVWGVGNEAGVGPGLGEWAVVTGSTDGIGKSYAEELAKHGMKVVLISRSKDKLDQVSSEIKEKFKVETRTIAVDFASEDIYDKIKTGLAGLEIGILVNNVGMSYEYPEYFLDVPDLDNVIKKMININILSVCKMTQLVLPGMVERSKGAILNISSGSGMLPVPLLTIYSATKTFVDFFSQCLHEEYRSKGVFVQSVLPYFVATKLAKIRKPTLDKPSPETFVKSAIKTVGLQSRTNGYLIHALMGSIISNLPSWIYLKIVMNMNKSTRAHYLKKTKKN

SEQ ID NO: 2017 - DNA, 561 bp, Homo sapien
accacagtggtgtccgagaagtcaggcacgtagctcagcggcggccgcggcgcgtgcgtctgtgcctctgcgcgggtctcctggtccttctgccatcatgccgatgttcatcgtaaacaccaacgtgccccgcgcctccgtgccggacgggttcctctccgagctcacccagcagctggcgcaggccaccggcaagcccccccagtacatcgcggtgcacgtggtcccggaccagctcatggccttcggcggctccagcgagccgtgcgcgctctgcagcctgcacagcatcggcaagatcggcggcgcgcagaaccgctcctacagcaagctgctgtgcggcctgctggccgagcgcctgcgcatcagcccggacagggtctacatcaactattacgacatgaacgcggccaatgtgggctggaacaactccaccttcgcctaagagccgcagggacccacgctgtctgcgctggctccacccgggaacccgccgcacgctgtgttctaggcccgcccaccccaaccttctggtggggagaaataaacggtttagagact

SEQ ID NO: 2018 - protein, 115 aa, Homo sapien
MPMFIVNTNVPRASVPDGFLSELTQQLAQATGKPPQYIAVHVVPDQLMAFGGSSEPCALCSLHSIGKIGGAQNRSYSKLLCGLLAERLRISPDRVYINYYDMNAANVGWNNSTFA

SEQ ID NO: 2019 - DNA, 1109 bp, Homo sapien
actggaagaccaggcagcccagctgaaggcagtaagctcggctcacagtcgcaggagagttctggggtacacgggcaaaggggcttgagaaggcccggaggcgaagccgaagagaagcaactgtgccccggagaagagaagctcgcccattccagactgggaaccagctttcagtgaagatggcagggccagaactgttgctcgactccaacatccgcctctgggtggtcctacccatcgttatcatcactttcttcgtaggcatgatccgccactacgtgtccatcctgctgcagagcgacaagaagctcacccaggaacaagtatctgacagtcaagtcctaattcgaagcagagtcctcagggaaaatggaaaatacattcccaaacagtctttcttgacacgaaaatattatttcaacaacccagaggatggatttttcaaaaaaactaaacggaaggtagtgccaccttctcctatgactgatcctactatgttgacagacatgatgaaagggaatgtaacaaatgtcctccctatgattcttattggtggatggatcaacatgacattctcaggctttgtcacaaccaaggtcccatttccactgaccctccgttttaagcctatgttacagcaaggaatcgagctactcacattagatgcatcctgggtgagttctgcatcctggtacttcctcaatgtatttgggcttcggagcatttactctctgattctgggccaagataatgccgctgaccaatcacgaatgatgcaggagcagatgacgggagcagccatggccatgcccgcagacacaaacaaagctttcaagacagagtgggaagctttggagctgacggatcaccagtgggcactagatgatgtcgaagaagagctcatggccaaagacctccacttcgaaggcatgttcaaaaaggaattacagacctctattttttgaagaccgagcagggattagctgtgtcaggaacttggagttgcacttaaccttgtaactttgtttggagctggcacctcttgaaataaaaaggaggatgcacgagctggcaggcatgcaaaaaaaaaaaaaaaaaaaaaaaaaaaa

SEQ ID NO: 2020 - protein, 261 aa, Homo sapien
MAGPELLLDSNIRLWVVLPIVIITFFVGMIRHYVSILLQSDKKLTQEQVSDSQVLIRSRVLRENGKYIPKQSFLTRKYYFNNPEDGFFKKTKRKVVPPSPMTDPTMLTDMMKGNVTNVLPMILIGGWINMTFSGFVTTKVPFPLTLRFKPMLQQGIELLTLDASWVSSASWYFLNVFGLRSIYSLILGQDNAADQSRMMQEQMTGAAMAMPADTNKAFKTEWEALELTDHQWALDDVEEELMAKDLHFEGMFKKELQTSIF

SEQ ID NO: 2021 - DNA, 5287 bp, Homo sapien
ggcctcgcctgcggccgctccctccgcctcctccccgccccgagccccagtcagcccgtcttccttcccctcccttgcatgatggaaacaccatggctgcggcggcccagctctctctgacacagttatcaagtgggaatcctgtatatgaaaaatactatagacaggttgatacaggcaatactggaagggtgttggcttctgatgctgctgctttcctgaaaaaatcagggcttccagacttgatacttggaaagatttgggatttagccgacacagatggcaaaggtatcctgaacaaacaagaattctttgttgctttgcgtcttgtggcatgtgcccagaatggattggaagtttcactaagtagtttgaacctggctgttcctccaccaagatttcatgataccagtagtcctttgctaatcagtggaacctctgcagctgagctcccatgggctgtaaaacctgaagataaggccaaatatgatgcaatatttgatagtttaagcccagtgaatggatttctgtctggtgataaagtgaaaccagtgttgctcaactctaagttacctgtggatatccttggaagagtaagatattatttactccgaaatgtttgggagttgagtgatattgaccatgatggaatgcttgacagagatgagtttgcagttgccatgtttttggtatactgtgcactggagaaagaacctgtgccaatgtccttgcctccagccttggtgccaccatctaagagaaaaacgtgggttgtatcccctgcagaaaaagctaaatatgatgaaatcttcctgaaaactgataaagatatggacggatttgtgtctggattggaggtccgtgaaatattcttgaaaacaggtttaccttctaccttactagcccatatatggtcattatgcgacacaaaggactgtgggaagctttcaaaggatcagtttgccttggcttttcacttaatcagtcagaagttaatcaagggcattgatcctcctcacgttcttactcctgaaatgattccaccatcagacagggccagtttacaaaagaacatcataggatcaagtcctgttgcagatttctctgctattaaggaactagatactcttaacaatgaaatagttgacctacagagggaaaagaataatgtggaacaggaccttaaggagaaggaagatactattaaacagaggacaagtgaggttcaggatcttcaagatgaagttcaaagggagaatactaatctgcaaaaactacaggcccagaaacagcaggtacaggaactccttgatgaactggatgagcagaaagcccagctggaggagcaactcaaggaagtcagaaagaaatgtgctgaggaggcccaactgatctcttctctgaaagctgaattaactagtcaggaatcgcagatctccacttatgaagaagaattggcaaaagctagagaagagctgagccgtctacagcaagaaacagcagaattggaggagagtgtagagtcagggaaggctcagttggaacctcttcagcagcacctacaagattcacaacaggaaattagttcaatgcaaatgaaactgatggaaatgaaagatttggaaaatcataatagtcagttaaattggtgcagtagcccacacagcattcttgtaaacggagctacagattattgcagcctcagcaccagcagcagtgaaacagccaaccttaatgaacatgttgaaggccagagcaacctagagtctgagcccatacaccaggaatctccagcaagaagtagtcctgaactactgccttctggtgtgactgatgaaaatgaggtgactacagctgttactgaaaaagtttgttctgaactcgacaataatagacattcaaaagaggaagatccatttaatgtagactcaagttcgctgacaggtccagttgcagatacaaacttggattttttccagtctgatccttttgttggcagtgatcctttcaaggatgatccttttggaaaaatcgatccatttggtggtgatcctttcaaaggttcagatccatttgcatcagactgtttcttcaggcaatctactgatccttttgccacttcaagcactgaccctttcagtgcagccaacaatagcagtattacatcggtagaaacgttgaagcacaatgatccttttgctcctggtggaacagttgttgcagcaagcgattcagccacagacccctttgcttctgtttttgggaatgaatcatttggaggtggatttgctgacttcagcacattgtcaaaggtcaacaatgaagatccttttcgttcagccacatcgagctctgtcagcaacgtagtgattacaaaaaatgtatttgaggaaacatcggtcaaaagtgaagatgaacccccagcactgccaccaaagatcggaactccaacaagaccctgccctctaccacctgggaaaagatccatcaacaaattggattctcctgatccctttaaactgaatgatccatttcagcctttcccaggcaacgatagccccaaagaaaaagatcctgaaatattttgtgatccattcacttctgctactaccactaccaataaagaggctgatccaagcaattttgccaacttcagtgcttatccctctgaagaagatatgatcgaatgggccaagagggaaagtgagagagaggaagagcagaggcttgcccgactaaatcagcaggaacaagaagacttagaactggctattgcactcagcaaatctgagatatcagaagcatgaagaattctcttgttctttggcaacaatatagtattcttcttcctgaatactgaaactatttacaatgtgtatcaaaactacctgtgagcatgggaatacaaaaggtttgagattcctgtaaatgtgacaaaattttaggattttttttttttcttcattacagattcgtctttttttttttttcttataaaagccgtaacccagtcagacaaattcaccttcacttaggcccctgttctggtatacatttactgtgagcttttgcctgcctgtgctattttacttgtaaagctagagcacccaagcttctgccttctggaatatagagaaatagtttcaccctgcactaccctgttctgtagttattctgatgatagccagtgaggttcttaaagtttgcagtattctcccctgattggaatggttgagtgagggtaagggaaagaatatcttatttcttttatgattggtgcaaattggctaaagtgcatttttaaatttcctctacttaatttgtttttcagagataaggaaaaatattttgcacagatttactccactatggaaaagggatgctgtaggttgaaccattatagcctcagattcgatcttttcctaactaaaaatattaaagcctcatgtgtgaaataaatttttaaaaagatttatctggatttagagaattttagatcaacagatacctctcagtgtgtttgctaattaataaaaatcagtttcttacaaataaagtttgtaagaaaatgttcattttaagtgatagatagtggagaaaatttatcacctaaaatatacccatcagtataaggcaagcaaaagtcttaacatggcagccattctgcctttgccgtggccctgtcctgtttagttcttagtgggttaatttttgtacttttgcagaagaaacttcagcaagctagaactggaaggtactttaatttttcatatatatttgtttttttttttttaatgaaggctcatttacttgaaatgtaaaaactttcactgaatacaaatagaaaaagtgatgtgttttatatcatattgctttttgtccatctttgtggtttagtttatttactcacttcatgtttttcacctataaaattgtcaagctagcaaaaaaactcttgtttttttaattgggagagaagagacctgccagattatcagacctcttcatgttaaaagaccatctcctgtaaaactgacctagtggacaagctgaatttgaaatagactgtgaagtaagctgtaacttgtcattttaattttgtttaacacggttactgacttagatgatgtattaaataccaagataaagaaaaatgcacctaaaatctaattagaattctctgggtcaccaagtcaaggtggtattgatctgtgttaatctgagtaacttattgcctagcctataaataaattccaaaatatccaattcatttcttcttgaaatggtgcttgttttgttttctttccattacacaattagactcctacagtttaaaacaaactttaaaccactatcttgcactgctaacttttttctacctttgtaaatagaaacatttctgcataaaagtcatacatatgaagcaagggctgaatcataatcacaaggcttaattttgataaacgaatccagtgacctaaggattttctgcaaaatttgactgggagttgtgataggtggtatttttgtttattttcttcctcttactccttaggataaaggtaagttgacttgaacaactttcttttgcactgggaaaataagcaaatgtttaaatgcttcaaaaaaattttcaattaaactcaaatattaaatatctataacttataaacaccaactttcaatgtaataaatgtatcctaatcttatgtatgtttaactggattacatagatttttatcttttgttaaaatgtgtataccccgtggaccaacataatattaaagtatgtatatattatataaatatatatgtatatgtgctcgcttgtgtaggatgaatgtcttagagtcgtttgtggtattttatgttgttgactctggctccagggcctgtgcttgaaaaggacagataagtattgcccagagctaagtggcactacttacaaagttttaaatgtcttctacatactgattcatgtttatttgagctctctttatagaattttctcttaaagtttcaaacctctaagttgtagcctgtaattatgagaacagtaaactttaagtaataataaagaatcccatccatatatccaatttgcaattgagttttgcatggttctctgattatgtccatgctgtgtccaaggaggagtaggtacatacaatcagcacagattaatatatgtaaagggtttgggacagcacctggtatagaataaataataaatgtaaactattcaaaaaaaatctatgtcgggtgcggagaaagaggtaatgaaatg

SEQ ID NO: 2022 - protein, 934 aa, Homo sapien
PRLRPLPPPPPRPEPQSARLPSPPLHDGNTMAAAAQLSLTQLSSGNPVYEKYYRQVDTGNTGRVLASDAAAFLKKSGLPDLILGKIWDLADTDGKGILNKQEFFVALRLVACAQNGLEVSLSSLNLAVPPPRFHDTSSPLLISGTSAAELPWAVKPEDKAKYDAIFDSLSPVNGFLSGDKVKPVLLNSKLPVDILGRVRYYLLRNVWELSDIDHDGMLDRDEFAVAMFLVYCALEKEPVPMSLPPALVPPSKRKTWVVSPAEKAKYDEIFLKTDKDMDGFVSGLEVREIFLKTGLPSTLLAHIWSLCDTKDCGKLSKDQFALAFHLISQKLIKGIDPPHVLTPEMIPPSDRASLQKNIIGSSPVADFSAIKELDTLNNEIVDLQREKNNVEQDLKEKEDTIKQRTSEVQDLQDEVQRENTNLQKLQAQKQQVQELLDELDEQKAQLEEQLKEVRKKCAEEAQLISSLKAELTSQESQISTYEEELAKAREELSRLQQETAELEESVESGKAQLEPLQQHLQDSQQEISSMQMKLMEMKDLENHNSQLNWCSSPHSILVNGATDYCSLSTSSSETANLNEHVEGQSNLESEPIHQESPARSSPELLPSGVTDENEVTTAVTEKVCSELDNNRHSKEEDPFNVDSSSLTGPVADTNLDFFQSDPFVGSDPFKDDPFGKIDPFGGDPFKGSDPFASDCFFRQSTDPFATSSTDPFSAANNSSITSVETLKHNDPFAPGGTVVAASDSATDPFASVFGNESFGGGFADFSTLSKVNNEDPFRSATSSSVSNVVITKNVFEETSVKSEDEPPALPPKIGTPTRPCPLPPGKRSINKLDSPDPFKLNDPFQPFPGNDSPKEKDPEIFCDPFTSATTTTNKEADPSNFANFSAYPSEEDMIEWAKRESEREEEQRLARLNQQEQEDLELAIALSKSEISEA

SEQ ID NO: 2023 - DNA, 1072 bp, Homo sapien
cagagctgctgtcatggcggccgctctgtggggcttctttcccgtcctgctgctgctgctgctatcgggggatgtccagagctcggaggtgcccggggctgctgctgagggatcgggagggagtggggtcggcataggagatcgcttcaagattgaggggcgtgcagttgttccaggggtgaagcctcaggactggatctcggcggcccgagtgctggtagacggagaagagcacgtcggtttccttaagacagatgggagttttgtggttcatgatataccttctggatcttatgtagtggaagttgtatctccagcttacagatttgatcccgttcgagtggatatcacttcgaaaggaaaaatgagagcaagatatgtgaattacatcaaaacatcagaggttgtcagactgccctatcctctccaaatgaaatcttcaggtccaccttcttactttattaaaagggaatcgtggggctggacagactttctaatgaacccaatggttatgatgatggttcttcctttattgatatttgtgcttctgcctaaagtggtcaacacaagtgatcctgacatgagacgggaaatggagcagtcaatgaatatgctgaattccaaccatgagttgcctgatgtttctgagttcatgacaagactcttctcttcaaaatcatctggcaaatctagcagcggcagcagtaaaacaggcaaaagtggggctggcaaaaggaggtagtcaggccgtccagagctggcatttgcacaaacacggcaacactgggtggcatccaagtcttggaaaaccgtgtgaagcaactactataaacttgagtcatcccgacgttgatctcttacaactgtgtatgttaactttttagcacatgttttgtacttggtacacgagaaaacccagctttcatcttttgtctgtatgaggtcaatattgatgtcactgaattaattacagtgtcctatagaaaatgccattaataaattatatgaactactatacattatgtatattaattaaaacatcttaatccagaaaaaaaaaaaaaaaaaaaaa

SEQ ID NO: 2024 - protein, 242 aa, Homo sapien
MAAALWGFFPVLLLLLLSGDVQSSEVPGAAAEGSGGSGVGIGDRFKIEGRAVVPGVKPQDWISAARVLVDGEEHVGFLKTDGSFVVHDIPSGSYVVEVVSPAYRFDPVRVDITSKGKMRARYVNYIKTSEVVRLPYPLQMKSSGPPSYFIKRESWGWTDFLMNPMVMMMVLPLLIFVLLPKVVNTSDPDMRREMEQSMNMLNSNHELPDVSEFMTRLFSSKSSGKSSSGSSKTGKSGAGKRR

SEQ ID NO: 2025 - DNA, 2605 bp, Homo sapien
gcggagctccgcatccaaccccgggccgcggccaacttctctggactggaccagaagtttctagccggccagttgctacctccctttatctcctccttcccctctggcagcgaggaggctatttccagacacttccacccctctctggccacgtcacccccgcctttaattcataaaggtgcccggcgccggcttcccggacacgtcggcggcggagaggggcccacggcggcggcccggccagagactcggcgcccggagccagcgccccgcacccgcgccccagcgggcagaccccaacccagcatgagcgccgccacccactcgcccatgatgcaggtggcgtccggcaacggtgaccgcgaccctttgccccccggatgggagatcaagatcgacccgcagaccggctggcccttcttcgtggaccacaacagccgcaccactacgtggaacgacccgcgcgtgccctctgagggccccaaggagactccatcctctgccaatggcccttcccgggagggctctaggctgccgcctgctagggaaggccaccctgtgtacccccagctccgaccaggctacattcccattcctgtgctccatgaaggcgctgagaaccggcaggtgcaccctttccatgtctatccccagcctgggatgcagcgattccgaactgaggcggcagcagcggctcctcagaggtcccagtcacctctgcggggcatgccagaaaccactcagccagataaacagtgtggacaggtggcagcggcggcggcagcccagcccccagcctcccacggacctgagcggtcccagtctccagctgcctctgactgctcatcctcatcctcctcggccagcctgccttcctccggcaggagcagcctgggcagtcaccagctcccgcgggggtacatctccattccggtgatacacgagcagaacgttacccggccagcagcccagccctccttccaccaagcccagaagacgcactacccagcgcagcagggggagtaccagacccaccagcctgtgtaccacaagatccagggggatgactgggagccccggcccctgcgggcggcatccccgttcaggtcatctgtccagggtgcatcgagccgggagggctcaccagccaggagcagcacgccactccactccccctcgcccatccgtgtgcacaccgtggtcgacaggcctcagcagcccatgacccatcgagaaactgcacctgtttcccagcctgaaaacaaaccagaaagtaagccaggcccagttggaccagaactccctcctggacacatcccaattcaagtgatccgcaaagaggtggattctaaacctgtttcccagaagcccccacctccctctgagaaggtagaggtgaaagttccccctgctccagttccttgtcctcctcccagccctggcccttctgctgtcccctcttcccccaagagtgtggctacagaagagagggcagcccccagcactgcccctgcagaagctacacctccaaaaccaggagaagccgaggctcccccaaaacatccaggagtgctgaaagtggaagccatcctggagaaggtgcaggggctggagcaggctgtagacaactttgaaggcaagaagactgacaaaaagtacctgatgatcgaagagtatttgaccaaagagctgctggccctggattcagtggaccccgagggacgagccgatgtgcgtcaggccaggagagacggtgtcaggaaggttcagaccatcttggaaaaacttgaacagaaagccattgatgtcccaggtcaagtccaggtctatgaactccagcccagcaaccttgaagcagatcagccactgcaggcaatcatggagatgggtgccgtggcagcagacaagggcaagaaaaatgctggaaatgcagaagatccccacacagaaacccagcagccagaagccacagcagcagcgacttcaaaccccagcagcatgacagacacccctggtaacccagcagcaccgtagcctctgccctgtaaaaatcagactcggaaccgatgtgtgctttagggaattttaagttgcatgcatttcagagactttaagtcagttggtttttattagctgcttggtatgcagtaacttgggtggaggcaaaacactaataaaagggctaaaaaggaaaatgatgcttttcttctatattcttactctgtacaaataaagaagttgcttgttgtttgagaagtttaaccccgttgcttgttctgcagccctgtctacttgggcacccccaccacctgttagctgtggttgtgcactgtcttttgtagctctggactggaggggtagatggggagtcaattacccatcacataaatatgaaacatttatcagaaatgttgccattttaatgagatgattttcttcatctcataattaaaatacctgactttagagagagtaaaatgtgccaggagccataggaatatctgtatgttggatgactttaatgctacattttaaaaaaagaaaataaagtaataatataactcaaaaaaaaaaaaaaaaaaaaaaaaaaaaaaaaaaaaaaaaa

SEQ ID NO: 2026 - protein, 575 aa, Homo sapien
MSAATHSPMMQVASGNGDRDPLPPGWEIKIDPQTGWPFFVDHNSRTTTWNDPRVPSEGPKETPSSANGPSREGSRLPPAREGHPVYPQLRPGYIPIPVLHEGAENRQVHPFHVYPQPGMQRFRTEAAAAAPQRSQSPLRGMPETTQPDKQCGQVAAAAAAQPPASHGPERSQSPAASDCSSSSSSASLPSSGRSSLGSHQLPRGYISIPVIHEQNVTRPAAQPSFHQAQKTHYPAQQGEYQTHQPVYHKIQGDDWEPRPLRAASPFRSSVQGASSREGSPARSSTPLHSPSPIRVHTVVDRPQQPMTHRETAPVSQPENKPESKPGPVGPELPPGHIPIQVIRKEVDSKPVSQKPPPPSEKVEVKVPPAPVPCPPPSPGPSAVPSSPKSVATEERAAPSTAPAEATPPKPGEAEAPPKHPGVLKVEAILEKVQGLEQAVDNFEGKKTDKKYLMIEEYLTKELLALDSVDPEGRADVRQARRDGVRKVQTILEKLEQKAIDVPGQVQVYELQPSNLEADQPLQAIMEMGAVAADKGKKNAGNAEDPHTETQQPEATAAATSNPSSMTDTPGNPAAP

SEQ ID NO: 2027 - DNA, 871 bp, Homo sapien
ggcacgagggttttctccgcgggcgcctcgggcggaacctggagataatgggcagcacctgggggagccctggctgggtgcggctcgctctttgcctgacgggcttagtgctctcgctctacgcgctgcacgtgaaggcggcgcgcgcccgggaccgggattaccgcgcgctctgcgacgtgggcaccgccatcagctgttcgcgcgtcttctcctccaggtggggcaggggtttcgggctggtggagcatgtgctgggacaggacagcatcctcaatcaatccaacagcatattcggttgcatcttctacacactacagctattgttaggttgcctgcggacacgctgggcctctgtcctgatgctgctgagctccctggtgtctctcgctggttctgtctacctggcctggatcctgttcttcgtgctctatgatttctgcattgtttgtatcaccacctatgctatcaacgtgagcctgatgtggctcagtttccggaaggtccaagaaccccagggcaaggctaagaggcactgagccctcaacccaagccaggctgacctcatctgctttgctttggcatgtgagccttgcctaagggggcatatctgggtccctagaaggccctagatgtggggcttctagattaccccctcctcctgccatacccgcacatgacaatggaccaaatgtgccacacgctcgctcttttttacacccagtgcctctgactctgtccccatgggctggtctccaaagctctttccattgcccagggagggaaggttctgagcaataaagtttcttagatcaatcaaaaaaaaaaaaaaaaaaaaaaaaaaaaaaaaaaaaaaaaaaaaaaaaaaaaa

SEQ ID NO: 2028 - protein, 163 aa, Homo sapien
MGSTWGSPGWVRLALCLTGLVLSLYALHVKAARARDRDYRALCDVGTAISCSRVFSSRWGRGFGLVEHVLGQDSILNQSNSIFGCIFYTLQLLLGCLRTRWASVLMLLSSLVSLAGSVYLAWILFFVLYDFCIVCITTYAINVSLMWLSFRKVQEPQGKAKRH

SEQ ID NO: 2029 - DNA, 1992 bp, Homo sapien
tccctgctcacgagttcagggctcctgggcggccgctttttccagttccaggtgtgcagaagtgtcctctccccacgcgcggcgggctgcacttggtcgctggctccgagatcgcgcggggccgccggaagcccaagacggtaccgggggccgcagcgcagccggcgccgccctccgccctccccaacagcaggccgagtcccgtagcatccggtagggaaatggtcgtgctttcggtccccgccgaagtcaccgtgatcctgttagatatcgaaggtaccacaaccccgattgctttcgtgaaggacattttatttccttacatcgaagaaaatgttaaagagtatctgcagacacattgggaagaagaggagtgccagcaggatgtcagtcttttgaggaaacaggctgaagaggacgcccacctggatggggctgttcctatccctgcagcatctgggaatggagtggatgatctgcaacagatgatccaggccgtggtagataatgtgtgctggcagatgtccctggatcgaaagaccactgcactcaaacagctgcagggccacatgtggagggcggcattcacagctgggcgcatgaaagcagagttctttgcagatgtagttccagcagtcaggaagtggagagaggccggaatgaaggtgtacatctattcctcagggagtgtggaggcacagaaactgttattcgggcattctacggagggagatattcttgagcttgttgatggtcactttgataccaagattggacacaaagtagagagtgaaagttaccgaaagattgcagacagcattgggtgctcaaccaacaacattttgtttctgacagatgttactcgagaggccagtgctgctgaggaagcagatgtgcacgtagctgtggtggtgagaccaggcaacgcaggattaacagatgatgagaagacttactacagcctcatcacatccttcagtgaactatacctgccttcctcaacctagagaagggttgttaaggcagaccgccctgttccccagagttgtccctgtagtgtctaggtttattctaatggtaaaagtaacttacttaaaaaacatatgtacacatatgtatgcaagtatgtatatatgtgtatgctcagattaacttccataggtacataagtgaaagagtctcagttcagtgaacacaaaacttatttaaagatgctttatatgtagaaattgtttcaaatcatactctacccttagtgagggcaaagtgtagttggtagaagaaattgctaaatacctatctaatgtgctatgtttatcaaatcgtgtactaaaatggaaagctagttttgagaaattattcagaagccttgttattttaaaaatgaaatatttcaaagactgaatattttcaaagaaaatgaataattcattgcccttgtgatttagaagattataacagctgtatttcatatttgcctccttatatatatcaaagaccaaggtatttccttctgcttcaaaagaacaaaattgggaaagaaaactcacttgagtcttgatcaaacaagtgtcttttacttaagaagaaacttggtaatcattgtggcacccacagcaagcagttgccttaccagtgaaaaaggtgcactgaggtaacatctaaaacagagatgtggttcttaatgtttaacagaacagttctaatcctgccacgtgttatcattatagattttatagttgcctttctaactacttagcacagtttgagaatacgttaattgctatttactatttaaaaagttttactgaaatcagtccataacattaagatgagccctaatatgtaagattttcctctggaatggatgtgagaaatgtaaattttataacagcagtatttatcctggtttaattctaatacgatgtcatgttaatttcatgttgtgattaataaaagcattttttcttcaaaaaaaaaaaaaaaaaaaaa

SEQ ID NO: 2030 - protein, 261 aa, Homo sapien
MVVLSVPAEVTVILLDIEGTTTPIAFVKDILFPYIEENVKEYLQTHWEEEECQQDVSLLRKQAEEDAHLDGAVPIPAASGNGVDDLQQMIQAVVDNVCWQMSLDRKTTALKQLQGHMWRAAFTAGRMKAEFFADVVPAVRKWREAGMKVYIYSSGSVEAQKLLFGHSTEGDILELVDGHFDTKIGHKVESESYRKIADSIGCSTNNILFLTDVTREASAAEEADVHVAVVVRPGNAGLTDDEKTYYSLITSFSELYLPSST

SEQ ID NO: 2031 - DNA, 1222 bp, Homo sapien
tgacgcatactatagcgctgttttcctgcactgataaacgaaaagcaatccaccaggtctcggcagctaactttccggcactacttatgcccgagcgtgtcgtcccagtgcgcaagtgcagcaggtggctacggaggggcgcgggaggaagaggaggaggaggaggaggctgggttgggccggcgcaagtgctgtgatgcggttccgggcagggttctgtagaatctgaataccagtttccgagcggcaaggcagcgatggcgatttttagtgtgtatgtggtgaacaaagctggcggcttgatttaccagttggacagctacgcgccacgggctgaggctgagaaaactttcagttatccgctggatctgctgctcaagctacacgatgagcgtgtgttggttgctttcggccagcgggacggcatccgagtgggtcatgcagtgctggccatcaatggcatggacgtgaatggcaggtacacggccgacgggaaagaggtgctggagtatctgggtaaccctgctaattacccggtgtccattcgatttggccggccccgcctcacttctaatgagaagcttatgctggcctccatgttccactcgctctttgccatcggctcccagctgtctcctgaacagggaagctcaggcattgagatgctggagacagacacattcaaattgcactgctaccagacactgacagggatcaagtttgtggttctagcagatcctaggcaagctggaatagattctcttctccgaaagatttatgagatttactcagactttgccctcaagaatccattctattccttagaaatgcctatcaggtgtgagctctttgaccagaacctgaagctagctctggaggtggcagagaaggctggaacttttggacctgggtcataggctgaacctgttatggacccccaaattctgagagttcctgcaacaagaatactgctgttgacactccagtggaaatcccagcagccttgttagtgcacttgaaagtgggagaatgctgaccctgatgacttgtactgattcctgagccttaacactgtgctctttccttctgtatataccatggtcttactttccaactctgtacagatttatttatggaggagctaggtccataaatgttgtaataaatattcctttgatcttggtgtttgcgtaaaaaaaaaaaaaaaaaaaaaaaaaaaaaa

SEQ ID NO: 2032 - protein, 219 aa, Homo sapien
MAIFSVYVVNKAGGLIYQLDSYAPRAEAEKTFSYPLDLLLKLHDERVLVAFGQRDGIRVGHAVLAINGMDVNGRYTADGKEVLEYLGNPANYPVSIRFGRPRLTSNEKLMLASMFHSLFAIGSQLSPEQGSSGIEMLETDTFKLHCYQTLTGIKFVVLADPRQAGIDSLLRKIYEIYSDFALKNPFYSLEMPIRCELFDQNLKLALEVAEKAGTFGPGS

SEQ ID NO: 2033 - DNA, 556 bp, Homo sapien
ggccacgaggggaaattgacgaacacgtgacgcggtcgggcggaccactgcagactgagcggtggaccgaattgggaccgctggcttataagcgatcatgtttctccagtattacctcaacgagcagggagatcgagtctatacgctgaagaaatttgacccgatgggacaacagacctgctcagcccatcctgctcggttctccccagatgacaaatactctcgacaccgaatcaccatcaagaaacgcttcaaggtgctcatgacccagcaaccgcgccctgtcctctgagggtcccttaaactgatgtcttttctgccacctgttacccctcggagactccgtaaccaaactcttcggactgtgagccctgatgcctttttgccagccatactctttggcatccagtctctcgtggcgattgattatgcttgtgtgaggcaatcatggtggcatcacccataaagggaacacatttgacttttttttctcatattttaaattactacaagattattaaagataaaatgattttgaaaaacaaaaaaaaaaaaa

SEQ ID NO: 2034 - protein, 64 aa, Homo sapien
MFLQYYLNEQGDRVYTLKKFDPMGQQTCSAHPARFSPDDKYSRHRITIKKRFKVLMTQQPRPVL

SEQ ID NO: 2035 - DNA, 1038 bp, Homo sapien
gaagtcctggtaatctggtccttgttcccgtctggataccagcttccttcagcagcgcaggcggtcggtccctgaggcccgtggaaggagtcaaacttgcgggaattttgcagtttatctgcagggctgttgtttccagcaagacccaaagctagaaaaggaggaggaagaaactgacccgatcagtgccagaagtcattgtattcaaagaagaataagcaagaaagaaaagaaggaaggaagagaggtagacagatacaagatgaaatcctgtcaaaaaatggaaggaaaaccagaaaatgagagtgaaccaaagcatgaggaagagccaaagcctgaggaaaagccagaagaggaggagaagctagaggaggaggccaaagcaaaaggaacttttagagaaaggctgattcaatctctccaggagtttaaagaagatatacacaacaggcatttaagcaatgaagatatgtttagagaagtggatgaaatagatgagataaggagagtcagaaacaaacttatagtgatgcgttggaaggttaatcgaaaccatccttacccctatttaatgtagtttaccttgatttttatctgatattaacaataccatatagcttgctttttattagcatttcctgatattcctttgtccatatttctacttataacctgttgctattaatggttttagatgtatctcttgttatctgcatctcattgtttattgtattttgaaccaatctacaagtctctgtcttttaataaaagaactttacacatttgtaaaaaagaggttcttggtaagatataaaatggaaaaaggctaagtaatatgtgaatatcatatttttgaaaggtaaaaagtacatttgtatattacatatatggacataacttgtgaaggatgaaagaaagtcagcctctcggtggtgggattatgaatgatttttctccttttgcttgttagtattttctatattctaaaattaacacacattattatagctagaatataaaagttttataaaaaaaaaa

SEQ ID NO: 2036 - protein, 104 aa, Homo sapien
MKSCQKMEGKPENESEPKHEEEPKPEEKPEEEEKLEEEAKAKGTFRERLIQSLQEFKEDIHNRHLSNEDMFREVDEIDEIRRVRNKLIVMRWKVNRNHPYPYLM

SEQ ID NO: 2037 - DNA, 1760 bp, Homo sapien
gaattccgagctttttattcctaagaggagaaaatcagtaacgggagaagcaggaggatgtccagaagaaatttcatcccttgctctcgcccctactctttctggtgttagatcgagctaccctctaaaagcagtttagagtggtaaaaaaaaaaaaaacacaccaaacgctcgcagccacaaaagggatgaaatttcttctggacatcctcctgcttctcccgttactgatcgtctgctccctagagtccttcgtgaagctttttattcctaagaggagaaaatcagtcaccggcgaaatcgtgctgattacaggagctgggcatggaattgggagactgactgcctatgaatttgctaaacttaaaagcaagctggttctctgggatataaataagcatggactggaggaaacagctgccaaatgcaagggactgggtgccaaggttcatacctttgtggtagactgcagcaaccgagaagatatttacagctctgcaaagaaggtgaaggcagaaattggagatgttagtattttagtaaataatgctggtgtagtctatacatcagatttgtttgctacacaagatcctcagattgaaaagacttttgaagttaatgtacttgcacatttctggactacaaaggcatttcttcctgcaatgacgaagaataaccatggccatattgtcactgtggcttcggcagctggacatgtctcggtccccttcttactggcttactgttcaagcaagtttgctgctgttggatttcataaaactttgacagatgaactggctgccttacaaataactggagtcaaaacaacatgtctgtgtcctaatttcgtaaacactggcttcatcaaaaatccaagtacaagtttgggacccactctggaacccgaggaagtggtaaacaggctgatgcatgggattctgactgagcagaagatgatttttattccatcttctatagcttttttaacaacattggaaaggatccttcctgagcgtttcctggcagttttaaaacgaaaaatcagtgttaagtttgatgcagttattggatataaaatgaaagcgcaataagcacctagttttctgaaaactgatttaccaggtttaggttgatgtcatctaatagtgccagaattttaatgtttgaacttctgttttttctaattatccccatttcttcaatatcatttttgaggctttggcagtcttcatttactaccacttgttctttagccaaaagctgattacatatgatataaacagagaaatacctttagaggtgactttaaggaaaatgaagaaaaagaaccaaaatgactttattaaaataatttccaagattatttgtggctcacctgaaggctttgcaaaatttgtaccataaccgtttatttaacatatatttttatttttgattgcacttaaattttgtataatttgtgtttctttttctgttctacataaaatcagaaacttcaagctctctaaataaaatgaaggactatatctagtggtatttcacaatgaatatcatgaactctcaatgggtaggtttcatcctacccattgccactctgtttcctgagagatacctcacattccaatgccaaacatttctgcacagggaagctagaggtggatacacgtgttgcaagtataaaagcatcactgggggatttaaggagaattgagagaatgtacccacaaatggcagcaataataaatggatcacacttaacg

SEQ ID NO: 2038 - protein, 300 aa, Homo sapien
MKFLLDILLLLPLLIVCSLESFVKLFIPKRRKSVTGEIVLITGAGHGIGRLTAYEFAKLKSKLVLWDINKHGLEETAAKCKGLGAKVHTFVVDCSNREDIYSSAKKVKAEIGDVSILVNNAGVVYTSDLFATQDPQIEKTFEVNVLAHFWTTKAFLPAMTKNNHGHIVTVASAAGHVSVPFLLAYCSSKFAAVGFHKTLTDELAALQITGVKTTCLCPNFVNTGFIKNPSTSLGPTLEPEEVVNRLMHGILTEQKMIFIPSSIAFLTTLERILPERFLAVLKRKISVKFDAVIGYKMKAQ

SEQ ID NO: 2039 - DNA, 1690 bp, Homo sapien
ggcacgaggaaggtttttgctgcgccaacgcagtgaccgaaggctccgctcacgcccggcctgatcctgcctgaagatggtgccactggtggctgtggtatcagggccccgtgcccagctctttgcctgcctgctcaggctgggcactcagcaggtcggcccccttcagctgcacaccggggccagccatgcggccaggaaccattatgaggtgctggtgctgggtgggggcagtggcggaatcaccatggctgcccgcatgaagaggaaagtgggtgcagagaatgtggccattgttgagcccagtgagagacatttctaccagccaatctggacactggtgggtgctggtgccaaacaattgtcctcatctggtcgtcccacggcaagtgtgattccatctggtgtagaatggatcaaagctagagtgactgagttgaacccagacaagaactgcattcacacagatgacgacgagaagatctcctaccgatatcttattattgctctcggaatccagctggactatgagaagattaaaggcctacctgaaggtttcgctcatcccaaaatagggtcgaattattcagttaagactgtagagaagacatggaaagctctgcaggacttcaaagagggcaatgccatcttcaccttcccaaatactccagtgaagtgtgctggagcccctcagaagatcatgtacttatcagaagcctacttcaggaagacagggaagcgatccaaggccaatatcattttcaacacttctcttggagccattttcggggttaagaagtatgcagatgccctgcaggagatcatccaggagcggaacctcactgttaactacaagaaaaacctcattgaagtccgagccgataaacaagaggctgtatttgagaacctggacaaaccaggagagacccaagtgatttcatatgaaatgcttcatgtcacacctccaatgagcccaccagatgtcctcaagaccagtcctgtggctgatgctgctggttgggtggatgtggataaagaaactctgcaacacaggaggtacccaaatgtgtttgggattggggactgcaccaaccttcctacgtcaaagaccgctgctgcagtagctgcccagtcaggaatacttgataggacaatttctgtaattatgaagaatcaaacaccaacaaagaagtatgatggctacacatcatgtccactggtgaccggctacaaccgtgtgattcttgctgagtttgactacaaagcagagccgctagaaaccttcccctttgatcaaagcaaagagcgcctttccatgtatctcatgaaagctgacctgatgcctttcctgtattggaatatgatgctaaggggttactggggaggaccagcgtttctgcgcaagttgtttcatctaggtatgagttaaggatggctcagcacttgctcatcttggatggcttctgggccaaaactgcagtcactgaatgaccaagagcagcacgaaggacttggaacctatccttgtaaagagttccttgatgggtaatggtgaccaaatgcctcccttttcagtacctttgaacagcaaccatgtgggctactcatgatgggcttgattctttgggaataataaaatgaaataatacttttattttctgaataaaagtttgtcactgaaaaaaaaaaa

SEQ ID NO: 2040 - protein, 450 aa, Homo sapien
MVPLVAVVSGPRAQLFACLLRLGTQQVGPLQLHTGASHAARNHYEVLVLGGGSGGITMAARMKRKVGAENVAIVEPSERHFYQPIWTLVGAGAKQLSSSGRPTASVIPSGVEWIKARVTELNPDKNCIHTDDDEKISYRYLIIALGIQLDYEKIKGLPEGFAHPKIGSNYSVKTVEKTWKALQDFKEGNAIFTFPNTPVKCAGAPQKIMYLSEAYFRKTGKRSKANIIFNTSLGAIFGVKKYADALQEIIQERNLTVNYKKNLIEVRADKQEAVFENLDKPGETQVISYEMLHVTPPMSPPDVLKTSPVADAAGWVDVDKETLQHRRYPNVFGIGDCTNLPTSKTAAAVAAQSGILDRTISVIMKNQTPTKKYDGYTSCPLVTGYNRVILAEFDYKAEPLETFPFDQSKERLSMYLMKADLMPFLYWNMMLRGYWGGPAFLRKLFHLGMS

SEQ ID NO: 2041 - DNA, 1668 bp, Homo sapien
ggcacgagggtgagcgctcgcaagaggacggcagaggcccggcagctcggagctccgggaccttgtggcgcatcaggacgcggctgtccctctgccgggacccagagccgccgccgccgctctgcctcctgcgtgttagcctcctctgcgcgctccgggcaggcggccgtgggagccgctggggcgaggacggcgcgaggctgctgctgctgcccccggcccgcgcggctggaaacggagaggccgagccaagcggcggcccctcttatgctgggaggatgctggagagtagcggctgcaaagcgctgaaggagggcgtgctggagaagcgcagcgacgggttgttgcagctctggaagaaaaagtgttgcatcctcaccgaggaagggctgctgcttatcccgcccaagcagctgcaacaccagcagcagcagcaacagcagcagcagcagcagcaacaacagcccgggcaggggccggccgagccgtcccaacccagtggccccgctgtcgccagcctcgagccgccggtcaagctcaaggaactgcacttctccaacatgaagaccgtggactgtgtggagcgcaagggcaagtacatgtacttcactgtggtgatggcagagggcaaggagatcgactttcggtgcccgcaagaccagggctggaacgccgagatcacgctgcagatggtgcagtacaagaatcgtcaggccatcctggcggtcaaatccacgcggcagaagcagcagcacctggtccagcagcagcccccctcgcagccgcagccgcagccgcagctccagccccaaccccagcctcagcctcagccgcaaccccagccccaatcacaaccccagcctcagccccaacccaagcctcagccccagcagctccacccgtatccgcatccacatccacatccacactctcatcctcactcgcacccacaccctcacccgcacccgcatccgcaccaaataccgcacccacacccacagccgcactcgcagccgcacgggcaccggcttctccgcagcacctccaactctgcctgaaaggggcagctcccgggcaagacaaggttttgaggacttgaggaagtgggacgagcacatttctattgtcttcacttggatcaaaagcaaaacagtctctccgccccgcaccagatcaagtagtttggacatcaccctactgaaaacttgcgattcttcttagttttctgcatacttttcatcacgatgcaggaaacgatttcgagtcaagaagacttttatttatgaacctttgaaaggatcgtcttgtatggtgaattttctaggagcgatgatgtactgtaattttattttaatgtattttgatttatgattatttattagttttttttaaatgcttgttctaagacatttctgaatgtagaccattttccaaaaaggaaactttattttcaaaaacctaatccgtagtaattcctaatcttggagaataaaaaagggcggtggaggggaaaacattaagaatttattcattatttctcgagtactttcagaaagtctgacactttcattgttgtgccagctggttgaaattaaaactctgatattaaaaaaaaaaaaaaaaaaaaaaaaaaaaaaaaaaaaaaaaaaaaaaaaaaaaaaaaaaaaa

SEQ ID NO: 2042 - protein, 259 aa, Homo sapien
MLESSGCKALKEGVLEKRSDGLLQLWKKKCCILTEEGLLLIPPKQLQHQQQQQQQQQQQQQQPGQGPAEPSQPSGPAVASLEPPVKLKELHFSNMKTVDCVERKGKYMYFTVVMAEGKEIDFRCPQDQGWNAEITLQMVQYKNRQAILAVKSTRQKQQHLVQQQPPSQPQPQPQLQPQPQPQPQPQPQPQSQPQPQPQPKPQPQQLHPYPHPHPHPHSHPHSHPHPHPHPHPHQIPHPHPQPHSQPHGHRLLRSTSNSA

SEQ ID NO: 2043 - DNA, 3227 bp, Homo sapien
cccgtatccgcatccacatccacatccacactctcatcctcactcgcacccacaccctcacccgcacccgcatccgcaccaaataccgcacccacacccacagccgcactcgcagccgcacgggcaccggcttctccgcagcacctccaactctgcctgaaaggggcagctcccgggcaagacaaggttttgaggacttgaggaagtgggacgagcacatttctattgtcttcacttggatcaaaagcaaaacagtctctccgccccgcaccagatcaagtagtttggacatcaccctactgaacaacttggcgattcttcttagttttctgcatacttttcatcaccgatgcaggaaacgatttcgagtcaagaagacttttatttatgaacctttgaaaggatcgtcttgtatggtgaattttctaggagcgatgatgtactgtaattttattttaatgtattttgatttatgattatttattagttttttttaaatgcttgttctaagacatttctgaatgtagaccattttccaaaaaggaaactttattttcaaaaacctaatccgtagtaattcctaatcttggagaataaaaaagggcggtggaggggaaaacattaagaatttattcattatttctcgagtactttcagaaagtctgacactttcattgttgtgccagctggttgaaattaaaactctgatattactttttttgaggatttttatttttgtttttgcttaaacactatagtttgtctagaagtttaaaaagctaaaagttaaaaatggtgtaattatgaaaatctaacactcaagatagtttctaaaaggaaatcagtagttaaggatacctgatttcaaaatatttaaagcataacctaactgatggtaggatgattgtatcttgaatatgtggtagggccacatctattgtaggaaaaccttgcttttatcatctgtgtgtaaagggcttaataaggagaagaggccttttgactgatttgtgagtataaatgcatttgctgtttcatttcaaaaatgttgtggaggaaaagagtacatttaacttgtataagagaatatttgtactcctgtccaggctgcaggacctttcttcgagagctttgcacacttgacttgaaccacattttctgatccctttactttgttttagaagcacactgaaaaatctcgttgtttaaagtacaatttgtaaatatttcaaaggtctaggagtcataacttttgttttcatactgaaaatgatgttgatcagagaaaccaactgttttgcttttcattgctctgtgagaaattgaggattctgttttgctgttaggtaagctaactcagaaattgaaaggaaagactggataaacaccggattttcagtaagaaaacaaccccagtcttgtcttagaagccacttgttgaggagtctgttgggggaaaaaagaggatatgcttttaaaggtagaacaaaccttcttctgtgttaaatcaaaaggatgttcaaaatccaccaggacagatgctacttgggtttaaatggagccatagatgatacaaagtcctcttggggctgaaaatcacttcctatttgcatggctttactaactggtttctgttttccattatctttttcacagaaagtcttggtcagtatttttccagcatttaaattgaaacggtcagtattagaccactgctaggttatgtagtcaagaaataaaaatagaattacatgctacagatgtctttattctccttccatctagaaaggagttccaaggtcaaattactttttagtgcaatagttaaatgacattttgagatcataactcatatccaaaaagttgcagggaaaattaaaatagctttcccctattaagctaatggcaaacaaaacttaagtggacccccacttccagtggttgtttaggttgcagttgtgaaaatatgctgccaacatttaaaaacttgtttcatatgtatatatgtatacacatatatgaatatgtatgtatatatacatatatgagaacatgtgtgtacacatatatgaatatgtatatatgtgtatgtatgtatatatgtatatgaaatgagagccacatctaaagatttcttaaatcaagtttggttcagcttccttagaactgtggctgtactttttgaggagtacctcatagtactatatttttaatgcatgcaaatcataatagctccaaatgaaccacagttttttcccaatggaggatttttttttaattcttgtactaaaaaaaaaaaatccataccaaatatttttacaaattaagattgatgtaggttttaaaaaaggcatttgtatgttgttagcttacatatggggctaggtaatttcattgcttaaaaagatgcgcctaggctccctcttggtggctggatttctttttcttcgcccgtggtggccatggtttttaatagggccaccggaatcatggtttcttttttttttttttttttggagatggagtctcgccctgtgacccaggctggagtgcagtggcacgatctcggctcactgcaacctctgcctcttgggttcacgccattctcctgtgtcagcctcctgagtagctgggactacaggtgaatgccaccacgcccggctgatttttgtatttttagtagagatggggtttcaccatagtggtcaggctgttctcgaactcctgacctcaggtgatccacctgccttggcctcccaaagtgctaggattacaggtgtgagccaccacacccggccccagagtaatggtttcttgactttctgtagcccttgttccttagtctgctgtgatatttatgttgacctttatcattttctattctgaacccctcttagcatttaatgtgaaatctaagaaattagaagtagaatggcttttattgttttgacacctttgaaattattattaataatttttccagagcaaaaaagcaaacacgctcaataagactaaacaaaacaaaatataaatgtacatcatttaatgtcccagtggctctattctacctgtaagaaaatgatacaaaaccacctaagatattttgaagcctgacaaatcagcttcatggaaaaaggtaaaaaatgcatttttcaaccgaaagggcagatccaatagaagacccgctccttaaataaacataaaatgtaaaaagttggaaaaaaaaa

SEQ ID NO: 2044 - DNA, 523 bp, Homo sapien
gcagatcgcttgcagcttgctagctgtgtgggctgggaggtctggtagggctgagcttgcaagaggatcaacatgcctttggctagagatttactacatccgtccttggaagaggaaaagaaaaaacataaaaagaaacgcctagtacaaagtccaaattcttactttatggatgtaaaatgtccaggttgctacaagatcaccacggttttcagccatgctcagacagtggttctttgtgtaggttgttcaacagtgttgtgccagcctacaggaggaaaggccagactcacagaagggtgttcatttagaagaaagcaacactaatgattcaaacagcttcctgaattttaattttgtgttgtctcacagaaagccttatcataaattccataattctaattaatttaccaagataatgtaattacatttggttttgtaaggtatacagcagtaatctcctattttggtgtcagtttttcaataaagttttgattatgggcaaaaaaaaaaaaaaaaaaaa

SEQ ID NO: 2045 - protein, 84 aa, Homo sapien
MPLARDLLHPSLEEEKKKHKKKRLVQSPNSYFMDVKCPGCYKITTVFSHAQTVVLCVGCSTVLCQPTGGKARLTEGCSFRRKQH

SEQ ID NO: 2046 - DNA, 1819 bp, Homo sapien
agacagcacctcagtctctgactccagccgcacacctcctgcctctaccagcaggggttgccgccagaccagagccagggccaggtccctgcgtccatcccccccggtaggatggacgtgagccatccttctaggggacttttttcagtgtgcgactcgtctctgttaggtggtaggagccagtttgtgtggcctgtgccacgctccacagtgcgtggctgggctctgtgtgtggcctgtgtcccctgtccctgcaggacccagcaggcatcgtggcgtgacagctgtgtccaagccactgcccgggcatcccatcacccaccagggtgcacagtctctcctgctgggggctttctgtcgcatgtgtgtctcctgtcgactctgcagtttgttctcagagcagaatgtttcctgttctcagtgcacaaagacactggttttcaatcggcgtctaaaaccacgttcctgcctttcattgcaacacggtgtgttcatttgtttaaaacagtttaatgagtaagtttagatgactggtcaatatcttaaaaatgtatattagtaagaagttcttcctggaatttttctttcgattctggcagaataaacaggtgtttttagttttcccactgtctgagccaagcaggaccctgtcccagagcaagagatgtccccttccatctctgacccttgcctgggacaagctttgatggggggccccagcttcaaggctgtggtgggaacagcacccccaaatgccagcctctcctttcttcccatccaccagtatactgcggggccatttctggtctttgtgcaacaggaaacccatttctggtgggatatgccttccagtgccacagggccactcaccccatgcatctctgtcctgcccgtcagtgctgggacggacagcaagggcaagcccagtgtctggcggataggtgggtgggaacagagaggggagaatgccgtcctaagcttctgcttggggatcccccacacgacctgggtactgcctgggaaacctgtcctaagtaaaactatggacctcgcctcgcccaccggcctgcgaagccagcatctccgtgaaggtggatggaagcgcctttgtcctcattttgagctgcaagctgggtcagcggctctgaagccctcgagtgactttctaacccaagacccagcccctggcaggaggagggtgggtgcagggctggtgggacaaaaagaggcctcagcaggcctggaagacccttccagtacatcccacagcgtgtcgagcagctgggagaacctgtgtcaagctcgagccgtcatagatccccatgaggtgtctgaagccccttcttggtgatgggaggcagaggtgctgacgttctggagcatggacgtgagtcctcagctggctccgcgtgggcccttggagggtgccaggtgtgtggtgaccttctggatgcctttaacttcatggctgcgtcattcctgatttagaactttaaccggagcttcatctagtgattgcaaaactggaccaatgggaggacggcggcgcagcccgctccctccgtggaatggagctcagctcttcggaggcatcaaagcacctgtcgcctccgtggtccccctgccgagggagtgcggcctctgcaaggttcgggggtggcttcgtttgcctggagtggccggccctgcttgtgccatgtggatgtttgtgagcctcggtcctacagcactgtgtaggctgcatctgtttcgtgctggtcctgttgacttgtatgatatccacaaataaatattttcatggcaaaaaaaaaaaaaaaaa

SEQ ID NO: 2047 - protein, 228 aa, Homo sapien
MSPSISDPCLGQALMGGPSFKAVVGTAPPNASLSFLPIHQYTAGPFLVFVQQETHFWWDMPSSATGPLTPCISVLPVSAGTDSKGKPSVWRIGGWEQRGENAVLSFCLGIPHTTWVLPGKPVLSKTMDLASPTGLRSQHLREGGWKRLCPHFELQAGSAALKPSSDFLTQDPAPGRRRVGAGLVGQKEASAGLEDPSSTSHSVSSSWENLCQARAVIDPHEVSEAPSW

SEQ ID NO: 2048 - DNA, 1155 bp, Homo sapien
cccgagaccacgtggcctccgagcagctcagggcgcccttgaaagttcttggatctgcgggttatggccggtcccttgcagggcggtggggcccgggccctggacctactccggggcctgccgcgtgtgagcctggccaacttaaagccgaatcccggctccaagaaaccggagagaagaccaagaggtcggagaagaggtagaaaatgtggcagaggccataaaggagaaaggcaaagaggaacccggccccgcttgggctttgagggaggccagactccattttacatccgaatcccaaaatacgggtttaacgaaggacatagtttcagacgccagtataagcctttgagtctcaatagactgcagtatcttattgatttgggtcgtgttgatcctagtcaacctattgacttaacccagcttgtcaatgggagaggtgtgaccatccagccacttaaaagggattatggtgtccagctggttgaggagggtgctgacacctttacggcaaaagttaatattgaagtacagttggcttcagaactagctattgctgccattgaaaaaaatggtggtgttgttactacagccttctatgatccaagaagtctggacattgtatgcaaacctgttccattctttcttcgtggacaacccattccaaaaagaatgcttccaccagaagaactggtaccatattacactgatgcaaagaaccgtgggtacctggcggatcctgccaaatttcctgaagcacgacttgaactcgccaggaagtatggttatatcttacctgatatcactaaagatgaactcttcaaaatgctctgtactaggaaggatccaaggcagattttctttggtcttgctccaggatgggtggtgaatatggccgataagaaaatcctaaaacctacagatgaaaatctccttaagtattatacctcatgaattcccgtccaaggaagcagagttgttaaagagtactggaataggggctgaaggatctatattcccttattgcattttccttatgtataattttccagatggtgatgttacttttcagtgtactcatatgtctcattttcatctaaaattaaatggcaggaaacaaggactgcatagagaaaaaaaaaaaaaaaaaaaaaa

SEQ ID NO: 2049 - protein, 296 aa, Homo sapien [sequence omitted]

SEQ ID NO: 2050 - DNA, 704 bp, Homo sapien
gcggatcatccgcttccggagtcgaggttttcgggcttgtaccgcttggcggtgcggcctggtgtcggcttgcaggttctttctgtgtttgttctctgccctgccaaggccgtagagctggtgcgtgcgggtagcggggctctccgaggagcgcggcacgccgcgcaccatggtccacctcactactctcctctgcaaggcctaccgtgggggccacttaaccatccgccttgccctgggtggctgcaccaatcggccgttctaccgcattgtggctgctcacaacaagtgtcccagggatggccgtttcgtagagcagctgggctcctatgatccattgcccaacagtcatggagaaaaactcgttgccctcaacctagacaggatccgtcattggattggctgcggggcccacctctctaagcctatggaaaagcttctgggtcttgctggctttttccctctgcatcctatgatgatcacaaatgctgagagactgcgaaggaaacgggcacgtgaagtcctgttagcttctcagaaaacagatgcagaagctacagatacagaggctacagaaacataaatgagctgactttagtgagcatagcagtgggaacaaggtcaaggtccttttgaaacactgcagcgatcttaattttgttagatttggagttcaataaatggagtatcctgaaaaaaaaaaa

SEQ ID NO: 2051 - protein, 137 aa, Homo sapien
MVHLTTLLCKAYRGGHLTIRLALGGCTNRPFYRIVAAHNKCPRDGRFVEQLGSYDPLPNSHGEKLVALNLDRIRHWIGCGAHLSKPMEKLLGLAGFFPLHPMMITNAERLRRKRAREVLLASQKTDAEATDTEATET

SEQ ID NO: 2052 - DNA, 1086 bp, Homo sapien
gtcggctggaaattatgtcctccgtcggttttccgcagtttttccaccaagcgagatatttttgggagttattccctaaataactgcattatatgctcctttcatgacgaaattgctgccgtggagaagactggaggaaactcgaggaagagggagaagccgacaagtgctcgacgggctaggaactgtcctgcttgggtgttagcgtttcccgccgggccagtaaggctgagtgacccggcgtggctactaggagaaggacgtacggtcctgctagtagaggaatatgtcgagtttctctagggcgccccagcaatgggccacttttgctagaatatggtatctcttagatgggaaaatgcagccacctggcaaacttgctgctatggcatctataagacttcagggattacataaacctgtgtaccatgcactgagtgactgtggggatcatgttgttataatgaacacaagacacattgcattttctggaaacaaatgggaacaaaaagtatactcttcgcatactggctacccaggtggatttagacaagtaacagctgctcagcttcacctgagggatccagtggcaattgtaaaactagctatttatggcatgctgccaaaaaaccttcacagaagaacaatgatggaaaggttgcatctttttccagatgagtatattccagaagatattcttaagaatttagtagaggagcttcctcaaccacgaaaaatacctaaacgtctagatgagtacacacaagaagaaatagacgccttcccaagattgtggactccacctgaagattatcggctataagagaataagaattgcagaaaataacagtgaagtgattgaaactttcttctgatgagtttctctaacctacaggatggagtaaaacaactgctacagttcagcacctgttttatgtgccgaatcactgtggggaaaggtcaggaaggtatagtccttcaataggaaattgtaattaaaatataattttatagaaccatttttatgtaatctgatttgaatgttatagttgataataataaaatcacttacttggttgactaaaa

SEQ ID NO: 2053 - protein, 178 aa, Homo sapien
MSSFSRAPQQWATFARIWYLLDGKMQPPGKLAAMASIRLQGLHKPVYHALSDCGDHVVIMNTRHIAFSGNKWEQKVYSSHTGYPGGFRQVTAAQLHLRDPVAIVKLAIYGMLPKNLHRRTMMERLHLFPDEYIPEDILKNLVEELPQPRKIPKRLDEYTQEEIDAFPRLWTPPEDYRL

SEQ ID NO: 2054 - DNA, 719 bp, Homo sapien
ctcgttttcccctcctgagcgggtggaggaggcccaagcgtgctgggcgcgctcccccttcctttccctccggcgtcctctcccggccctctcgcgctgcactgtctctccgacgcaagactgtcccggcccggatatggctcgtggacagcagaaaattcagtctcagcagaaaaatgccaaaaagcaagctggacaaaagaagaaacaaggacatgaccaaaaggctgctgccaaagctgccttaatatatacctgcactgtctgtaggacacaaatgccagaccctaagaccttcaagcagcactttgagagcaagcatcctaagactccacttcctccagaattagctgatgttcaggcataaggttgtttacaggtgaattcatgacacctttgactcttctactgtctcagaccttaggtaacatacctgcgctgcttttctaacaaactgttgatcagcaaaaataaaggggctacagaaacactcatttttatgctgttccctcttgggcttcatgcaaagacaattctgtgtaaatgtacagttgactctgatttggaaatatgaaaatcagtccatccttgttataaaaaatttttttacaattgtaattatattgatgttcatattgtgtaaaataactcatttaataaaatagtactttgatttacgacatcacaggaaaaaaaaaaaaaaaaaaaaaaaaaaaaaa

SEQ ID NO: 2055 - protein, 76 aa, Homo sapien
MARGQQKIQSQQKNAKKQAGQKKKQGHDQKAAAKAALIYTCTVCRTQMPDPKTFKQHFESKHPKTPLPPELADVQA

SEQ ID NO: 2056 - DNA, 1734 bp, Homo sapien
attgtgggaagggcggccggtgcagccgcagctgccatcttaggggcgcctggcgctacgggtttctcgttggaggcggccttcgtggcagctgtagacgccgggaaaaggcataaagtccgttggccgacacctttctttcctccggcctcggtagaaccgccagcccgcgtccgaaggcggaggcgaggggaactggccgcgtgaggggcctgaggcgagcggttagagcgtctcccggaaggatgggccggtctcggagccggagctcgtcccgctccaagcacaccaagagcagcaagcacaacaagaagcgcagccggtcccggtcgcgatcccgggacaaggagcgcgtgcggaagcgttccaaatctcgggaaagtaaacggaaccggcggcgggagtcgcggtcccgttcgcgctccaccaacacggccgtgtcccggcgcgagcgggaccgggagcgcgcctcgtccccgcccgaccgcatcgacatcttcgggcgcacggtgagcaagcgcagcagcctggacgagaagcagaagcgagaggaggaggagaagaaagcggagttcgagcggcagcgaaaaattcgacagcaagaaatagaagaaaaactcatcgaggaagaaacagcacgaagagtagaagaattggtagcaaaaagggtggaggaagaactggagaaaaggaaggatgaaattgaacgagaagttctccgaagggtggaggaagccaaacgcatcatggaaaagcagttgctcgaagaactcgagcgacagagacaagctgagcttgccgcacaaaaagctagagaggaggaagaacgtgcaaaacgtgaggagctagagcgaatactggaagagaataaccgaaaaattgcagaagcacaagccaaactggccgaagaacagttgagaattgttgaagaacaaagaaagattcatgaggaaaggatgaaactagaacaagaacgacaacgtcaacagaaagaagaacaaaaaattatcctgggcaaggggaagtccaggccaaaactgtccttctcattaaaaacccaggattaaattgcaaactctgaactttttacaaagaaaaatggaaaaactttgtatggtagcttcatgttgaagtggttttttgtttttgtttttgtttttttaatttgtaaaatctggaaagttagcttgttctaataggggctatgctctgcaattcccttttttttttttttttccttccactaagtcaaatccttatcagatcattgttgtattctaaggagtgacgtatttttcacctgtttggattctatattagtggtctgaggaagagcagatcacattgtaaaactatggatggtctgataaggcttttactgaccccactgacttcagagttatactctgcttgctacatcataatgctggttttgctgactttttgtttttttatatatttataaaaaaagaaaaagttggtgattgcattgggaaattcccagggtattactggacctatgtggtgtattgttaaaccagtgtccttgtgatactgtcgctcttgatgttcctgatacaggtaaggaaacagttggtcaactctgatacaaagtatatatacagttcagtattgtctctgttcattttgtttttatttcattgacaaaatcaaaccagcattccccattgtgtaaataaatgattttgctgaataaagtaaagtcttaaattc

SEQ ID NO: 2057 - protein, 273 aa, Homo sapien
MGRSRSRSSSRSKHTKSSKHNKKRSRSRSRSRDKERVRKRSKSRESKRNRRRESRSRSRSTNTAVSRRERDRERASSPPDRIDIFGRTVSKRSSLDEKQKREEEEKKAEFERQRKIRQQEIEEKLIEEETARRVEELVAKRVEEELEKRKDEIEREVLRRVEEAKRIMEKQLLEELERQRQAELAAQKAREEEERAKREELERILEENNRKIAEAQAKLAEEQLRIVEEQRKIHEERMKLEQERQRQQKEEQKIILGKGKSRPKLSFSLKTQD

SEQ ID NO: 2058 - DNA, 2550 bp, Homo sapien
ggcacgaggcagagggcggttcctggagttacagccgcgtttgcgggacgtgtctgcgcggcagtcctggcctgttgagcttgtccagacgaagcctcgcagggatgggttggagcctgggccgggcttcgctcaggcagcgtttgaggcagacccagcagggtcctcctggggccttcctgcctttgaactgcggtggcgggcgggcgcacggtctcctgtacgccctagactaggggccgccatctccatggccacggccgtgagccggccctgcgccggcaggtcgcgggacatactgtggcgcgttttgggctggaggatagttgcaagtattgtttggtcagtgctatttctacccatctgcaccacagtatttataattttcagcaggattgatttgtttcatcctatacagtggctgtctgattctttcagtgacctgtatagttcctatgtaatcttttacttcctgctgctgtcagtggtaataataataataagtattttcaatgtggagttctatgcagttgtgccttctattccttgctccagactagctctgatagggaagatcattcatcctcagcaactcatgcactcatttattcatgctgcaatgggaatggtgatggcctggtgtgctgcagtgataacccagggccagtacagctttcttgtggttccctgcactggtactaacagctttgatagccctgctgcgcaaacctgcttaaatgaatatcatctttttttcctactgactggagcatttatgggctatagctatagcctcctgtattttgttaacaacatgaactatcttccatttcccatcatacagcaatacaagttcttgcgttttaggagatctctgctcttattagttaaacacagttgtgtggaatcactgttcctggttagaaatttctgcattttatattattttcttggctatattcccaaagcttggattagcactgctatgaaccttcacatagatgagcaggttcataggccacttgacacagtgagtggcctcttaaatctctcgttactctaccatgtctggctgtgtggtgtctttctcctgacgacttggtatgtctcatggatactcttcaaaatctatgccacagaggctcatgtgtttcctgttcaaccaccatttgcagaagggtcagatgagtgccttccaaaagtgttaaatagcaatcctccccccatcataaagtatttagccttgcaggacctgatgttgctttctcaatattctccttcacgaagacaagaagttttcagcctcagccaaccaggtggacatccccacaattggacagccatttcaagggagtgtttgaatcttttaaatggtatgactcagaaactgattctctatcaagaagctgctgctacgaatgggagagtgtcttcatcttacccagtggaacctaagaaattaaattctccagaagaaactgcttttcagacaccaaaatctagccagatgcctcggccttcagtgccaccattagttaaaacatcactgttttcttcaaaattatctacacctgatgttgtgagcccatttgggaccccatttggctctagtgtaatgaatcggatggctggaatttttgatgtaaacacctgctatgggtcaccgcaaagtcctcagctaataagaagggggccaagattgtggacatcagcttctgatcagcaaatgactgaattttctaatccttctccatctacctctattagtgctgagggtaagacaatgagacaacccagtgtgatttattcatggattcagaataaacgtgaacagattaagaatttcttgtcaaaacgggtgctgataatgtattttttcagtaagcacccagaggcctccattcaggctgttttttcagatgcccaaatgcatatttgggcattagaaggtctgtcgcacttagtagcagcatcatttacagaggatagatttggagttgtccagacgacactaccagctatccttaatactttgttgacactgcaagaggcagtcgacaagtactttaagcttcctcatgcttccagtaaaccaccccggatttcaggaagccttgtggacacttcatataaaacattaagatttgcattcagagcatcactgaaaactgccatctatcgaataactactacatttggtgaacatctgaatgctgtgcaagcatctgcagaacatcagaaaagacttcaacagttcttggagttcaaagaatagttaagtaatataaactgtgttcattacactgctgatacaactacagatgggacagtaaatgttcagcattcttggatcagaagaaaacggactaattagatgcttcctttgtcgtggtggttgctttgaaaactatactttaatgggagaaatcatggaaagaaattctcaacagaataactgaaaactgccttttctgtaccgattgctttttgtgtgtgtggtataataaaatctttattcaattttacagaaaaaaaaaaaaaaaaaaaaaa

SEQ ID NO: 2059 - protein, 674 aa, Homo sapien
MATAVSRPCAGRSRDILWRVLGWRIVASIVWSVLFLPICTTVFIIFSRIDLFHPIQWLSDSFSDLYSSYVIFYFLLLSVVIIIISIFNVEFYAVVPSIPCSRLALIGKIIHPQQLMHSFIHAAMGMVMAWCAAVITQGQYSFLVVPCTGTNSFDSPAAQTCLNEYHLFFLLTGAFMGYSYSLLYFVNNMNYLPFPIIQQYKFLRFRRSLLLLVKHSCVESLFLVRNFCILYYFLGYIPKAWISTAMNLHIDEQVHRPLDTVSGLLNLSLLYHVWLCGVFLLTTWYVSWILFKIYATEAHVFPVQPPFAEGSDECLPKVLNSNPPPIIKYLALQDLMLLSQYSPSRRQEVFSLSQPGGHPHNWTAISRECLNLLNGMTQKLILYQEAAATNGRVSSSYPVEPKKLNSPEETAFQTPKSSQMPRPSVPPLVKTSLFSSKLSTPDVVSPFGTPFGSSVMNRMAGIFDVNTCYGSPQSPQLIRRGPRLWTSASDQQMTEFSNPSPSTSISAEGKTMRQPSVIYSWIQNKREQIKNFLSKRVLIMYFFSKHPEASIQAVFSDAQMHIWALEGLSHLVAASFTEDRFGVVQTTLPAILNTLLTLQEAVDKYFKLPHASSKPPRISGSLVDTSYKTLRFAFRASLKTAIYRITTTFGEHLNAVQASAEHQKRLQQFLEFKE

SEQ ID NO: 2060 - DNA, 8997 bp, Homo sapien
cgccgtggggccgaggtgtcgcttcctgacggggcggcgcggacggacgcggccggtgccggccgggacgccgggcccgcagcctagctcgccatctcgctcacgccgcccgcccgcggggccgtcagcccccgccgggccggggccatgcaggagagccagaccaagagcatgttcgtgtcccgggccctggagaagatcctagccgacaaggaggtgaagcggccccagcactcccagctgcgcagggcctgccaggtggcgctcgatgaaattaaagcagaaatagaaaagcagaggcttggcactgctgcaccaccaaaggcaaacttcattgaagctgacaagtattttcttccattcgagctagcttgccagtccaagtccccaagggtagtcagcacatcccttgactgcttgcagaaactcatcgcatacgggcacatcactggcaacgcccctgacagtggagcccctgggaagcggctgatcgacagaattgttgaaaccatttgcagttgttttcagggccctcagactgatgaaggggttcagttacaaataattaaggctcttctgactgcagtgacttccccacacattgaaattcatgagggtactatcctgcagacagtgagaacatgttacaatatctatttggccagcaaaaatctcatcaatcaaaccactgccaaggctacccttactcagatgctgaacgtcattttcacccgcatggaaaaccaagtgttgcaggaggccagagaactggaaaaaccaatccagtcaaaaccccagtcccctgtgatccaagctgcagcagtatccccaaagttcgttcgtttgaagcacagtcaggcacaaagcaaaccaacaactcccgaaaaaacagatttaaccaacggtgaacatgccaggagtgattctggaaaagtaagcacagaaaatggagacgcacccagagaaagaggctcatcactgtcagggactgatgacggagcccaggaggtggtgaaggacatcttggaagatgtagtcacatctgccattaaagaagcagcggaaaagcatggtctgacagaacctgagagagttctaggtgaactggagtgccaggaatgtgctattcccccaggagttgatgaaaactcacagaccaacgggatagccgatgacaggcagtccttgtcgtcagcagataatctggaatcggatgcacaaggacatcaagtggctgccaggttctcccacgttctgcagaaggatgccttccttgtgttccgctccctgtgcaagctgtccatgaaaccccttggtgaaggccctccagacccaaaatcccatgagctgcgttccaaggtggtttccctgcagctgctcctctctgtgttgcaaaatgctggccccgtattcaggactcacgagatgttcatcaatgcaatcaagcaatatctctgtgtggccttgtccaaaaacggcgtctcttcagtgcctgatgtctttgagctctctcttgccatttttcttactcttctttcaaactttaaaatgcacttgaaaatgcagatagaggtctttttcaaagagattttcctgaacattttagaaacatcaacaagttcttttgagcacaggtggatggtcattcagactctgacgaggatctgtgcagatgcccagtgtgttgtggatatttatgtcaactacgactgtgatttaaatgctgctaacatttttgagcgccttgtaaatgatttatccaaaattgctcagggaagaagtggacatgagctgggaatgacacctctgcaggagctcagcctgaggaagaaaggcctggagtgcctcgtgtccattctcaagtgcatggtggagtggagcaaagacctgtatgtgaatcccaaccaccagaccagcctcggtcaggagaggctcacggatcaggaaataggggatgggaaaggccttgacatggcaagacggtgtagtgtgacgtccatggagtccacagtgtcctcggggacccagacaactgttcaggatgaccctgagcaatttgaggtcatcaagcaaaaaaaaaaaatcattgaacacggcatcgagctgttcaacaagaaacccaagagggggatccagtttctccaggagcagggcatgctgggaacgtcagttgaagacatagcccaattcctgcaccaggaggagcgcctggattccacccaagtaggcgattttctgggagatagcgcaaggttcaacaaggaggtgatgtatgcctacgtggaccaacttgacttctgtgaaaaagaatttgtctcagccctgcggacattcctagaaggtttccgcctacctggagaagcccaaaagattgaccgattaatggagaagtttgccgcaagatacatagaatgcaaccaagggcaaactctgtttgctagtgctgacactgcttatgtcctagcgtattcaattattatgctgactacagacttgcacagtcctcaggtaaaaaataaaatgacgaaagagcagtatattaaaatgaatcggggtatcaatgatagtaaagatctgccagaagagtatctctcaagcatctatgaagagatagaaggcaagaaaattgcaatgaaagaaacaaaagagctaacgattgcaaccaaatctactaagcagaatgtagctagtgaaaagcagcggcggctgctgtacaacttagagatggagcaaatggctaaaacagccaaagctctgatggaggctgtgagccatgccaaagccccgtttaccagtgccactcacctggaccatgtccggccaatgttcaaactggtgtggacgccactattggcagcctacagcatcggactccagaactgtgatgacactgaagtggcctccttgtgtttggaaggcatccgatgtgcaatccgaatcgcctgcatctttggaatgcagctggaacgagatgcctatgttcaggctcttgctcgcttctccctactcacagccagctccagcatcacaaaaatgaagcagaaaaacatcgacaccattaagacgcttatcacagtggctcacaccgatggcaactaccttgggaattcctggcatgagatcttgaaatgcatcagccagctggagctcgctcagctgataggaaccggtgtgaagacgcgctacctgtctggatctgggcgtgaaagagaagggagcctgaagggccacacattggcaggagaagagttcatgggccttggcctcggtaatttggtgagtggcggagtgaataaaagacagatggccagcttccaagaatcggttggtgagaccagctcgcagagtgtggttgtagctgtggacaggatttttactgggtctaccagactggatggaaatgcaatagttgactttgtccgctggctgtgtgctgtgtccatggatgaactggcttccccccaccatcctcgcatgttcagcttgcagaagattgtggagatatcatactacaacatgaatcggatccgactacagtggtctcgaatatggcatgtgattggagatcacttcaataaggttggctgcaaccctaatgaagatgtggctatctttgctgttgactcattaaggcaactctccatgaagtttcttgagaagggtgaattagccaacttccgtttccagaaagattttctgaggccctttgagcatattatgaagaaaaacaggtctcccaccatccgggacatggcgatccgctgcattgcccagatggtgaactcccaggcggccaacatccgctcaggttggaagaacatctttgccgtgttccaccaggcagcctctgatcatgatgggaacattgtggagctggccttccagaccacttgccacattgtcacaactattttccagcaccattttcctgcagccatcgattcctttcaggatgctgtgaagtgcttatcagagttcgcctgcaacgccgctttccctgacacgagcatggaagcgattcggctcatccgcttctgtggcaaatacgtctctgagaggcctcgggtgctacaagaatacacaagtgatgacatgaatgtagctcctggtgacagagtctgggtccgaggctggttccccatcttattcgaactctcctgcatcattaatagatgcaagttagatgtacgaacaaggggactcacagtcatgtttgagatcatgaagagctatggccacacctttgaaaagcactggtggcaggacctgttcagaatcgtgtttcggatttttgacaatatgaaactccctgagcaactgtcagagaaatctgagtggatgacaacaacctgcaatcacgcactttatgctatttgtgatgtttttacccagttttatgaagctttgaatgaagttcttctttctgatgtatttgcacaattgcagtggtgtgtcaaacaagataatgaacagttggcgcgatcaggtacaaattgcttagaaaacttagtaatatccaatggagagaaattcagtcctgaagtctgggatgaaacctgcaactgtatgttggatattttcaaaacaaccatcccacatgttttgctgacatggagacctgtaggaatggaggaagattcatcagaaaagcatttggatgtggatctggaccgccagtctttaagcagcatagataaaaatccctctgagaggggacagagccagctctctaacccaacagatgacagctggaagggtagaccatacgcaaatcagaaactgtttgccagcctcctcatcaagtgtgtggtccagttggaattgatacagaccattgacaacattgtgttctaccctgcgacgagcaaaaaggaggatgcagagcacatggttgccgcccagcaagacacgctggatgcagatatccacatagagacggaggatcagggcatgtataagtacatgtcttcccagcacctcttcaagctgttggactgtttgcaggaatcccattcattctcaaaggccttcaactccaattacgagcagcggactgtcctgtggcgagcaggttttaagggcaagtctaaacccaatcttctaaaacaagaaaccagcagcctggcctgttgtttgaggatcctgtttcgaatgtatgttgatgagaaccgcagggattcctgggaagaaatacagcagagacttttaactgtttgcagtgaagctcttgcctatttcatcactgtgaattctgagagccatcgggaggcctggacaagtctcttgttgttacttctaactaaaaccctcaaaataaatgatgaaaagttcaaagcacatgcttcaatgtactacccctacttgtgtgaaattatgcagtttgacctgatccctgagctccgagcagttctgcggaagttcttcctacggataggtgttgtgtataagatatggataccagaagagccatcacaggtaccagcagcactgtcaccagtgtggtagccctggctgcccaggccagtgctgcagctctgcagaatgttcagcatgccatttctgactggcacatctcgtgaagtttcatagaaacaaggagttggcatcttggatctcagaatggcctggaaacggatggcctctacgctgttccatcacagtctccaactaaggcttatggtatttcattaaactgttgcatacccagttagcacagtaggtggggagtctgcttcatttctatcattccatttttctgattaaactgtcaaatctgtcattgcatatgccatcgttttctagcaaaatcccatgattggctataaacgttttgtaagaagtcactctccttgaaaatactgaacatagctgtataggtttgtgattattagagaatatgttaataaaacttcttgtaacggctaactgccacctaaaatatgctgggttttctgttgtttgagtgtgttagagaaatttgaatgtttttgtcagttacgagtcagccgtaattagattagtttaaggacaggtcaggattagagaagagttgtttttgtgttttgttaatgtctgagtgatttttaaagtattttacaaaaagatattgaaaatttggttgaaggcagagtttagtaattaagttagaattaagagttttgcgaggttaaaaaaatgtgcctcgtggatctccctgttttagtaacatggagagaaaaagtctacacgaaaaagtgaacaatttaatgaagatgattagccttccttgaaataagtatttgtggatgggtgttaaattaaaatttccagaatacactgtccatctcacacactctgaaatctaatatatgaagtagtaatgaaaatgaagtagtaatttaaccagagttcatttatccttgaataaacctttttattttcacctcagaaaagtgagtgtactggcagttagtgtcactgctttgcacagtccccattaaaggaccctccagagagggacagtaactgtgcatgagaagccgctcccataagcctcctcagccagatgtcatgggtggaactggagctgtgtcggggccagcacagctgaactgtgacaatggcaggaggtggcatgtgcccagcacttccattaatctgagcctaggagttgaattctttggcaaggttggattctgaggtccttattatgttaatgatggtgcaatactctcacctgcagtagaactgagttctgctgcagcttgtgtaaaagtgggcagtacacaagtacgtcccaaagcctgtgagcagtatacgtggatgctcacccatgagaaggagcacacacgcctcattctctgccctcacccactgctcacctagagcatcgctgagcgttagacaaagtgttacacagaatgattaaaactttcagacttctacctatgctctttagtcctgtaaattgggttgtattgatgtcaactctggtgccttagaagttagtagtttgggaacctatctgtaaaatcagatgttttttctttgtagagaaggatttctggtgcttttgcttactaagagaccgatattcttaagttgttttcttgttttaacagccttgagaaatgtttggttttggccagcagaattcttgtctacttttttctttcccaaaaagtgttttttaatttctctaccaaagaaaaaatgagcaggtttaggtttttacatgacttatatacattagataaaaggagctgtataatttagcaggaaaggactatgggagaatactttactgtgagtggaaaatgttagcacatttgactggtttgccctggaatccactgcacctttacactgcaccatgaaacctacactccctggtatcatagcgcgtcatcacctcaacaagtcagtcgtctccattgatatttgtacaaaaggtatacatggggaacacgtgttcattcattaagtccatcttgcgtgcagctatatccctgattggttatttttcctttccttctgaggttctcatgtcattttcttcatcggatgtgactaaaatttttctggtgtcttctgccctctctttaattttgcctcttgaggggtagcagatgtgtcagtgcattttattacttgctgaaacattcaggcttacatttcttattagtttagtattttaaaagatttaattttctgaatgaggcatttgaattgtaccagcaatggacttttaaaaaattggatgtaaaaccattcagggtgatttttcttgtcagtggacagtgacgaacagagatttgaaatcccttacctccaataataagccattcagcctaaattcatttttatgaataaatctcttctttctcatggtaaatgtggcttgtgccactcaaacactagtgaaagggtatgtacaaccgcaacatcaggccaggacaccatttatttaaccaagtaatggaggagagtgaaacattttccaaggccttatttctttttcataatgctttaagtgttgattatatgtgctgggtctctagagaagtttttatttgttacaatactgctgctttgagcaattttgtttctcttcattgtctgttaggggaatcaccagctttggcatcttaacaacagacagtggatgggtaatttttatttctgatacgcatctttagagtcaaatatatcttttccctgtactcctcatgtacaaccaaagaacatacattatgaaaattgtattataatatctggaaacacaacattttcctctggcaggtgacttttgtacgaaatgaaaaaaaaaaacctgtattttttttgttgttcttttgtgattaaggatatacatttagtagtctttgttattaaaggaacctgctgataagtacaagtgtgaccatctcattcaaatgtttgttgttatgatgcaaatggatattggtttcaatagaagctggatccttaatactgcattttctgaattctgttttaatatttgtgttaaagtagacatagctgaactcacatggaatcctggagttttgttatcagcagctttgcagtttgggaaacaaagaaaccaaagctgagtgttttaaagaatgaacatatctggaaatccttgctctcaaaacaaaacaatataatctatcaaaggtgttttactcagtgttctaatttttaaaaaattttatctgcatatttgcatcaaatatttatgtgtaaaatgtatgttttacctccttaaaatgcctaaaagttagttaatagttactttggtttaacctatacacaatgattaagtgcatttaatattggtaatttaatgaaaaccattccttgcccaatggatgtataaatttttgaaagaataagcagaattatataatatgaaatgctatgtaaagttttctatgtaaaaatattatgtataatactattaaaatatcccatgctttgatcaggtggtacatcaataaaattttaaaaagt

SEQ ID NO: 2061 - protein, 1785 aa, Homo sapien
MQESQTKSMFVSRALEKILADKEVKRPQHSQLRRACQVALDEIKAEIEKQRLGTAAPPKANFIEADKYFLPFELACQSKSPRVVSTSLDCLQKLIAYGHITGNAPDSGAPGKRLIDRIVETICSCFQGPQTDEGVQLQIIKALLTAVTSPHIEIHEGTILQTVRTCYNIYLASKNLINQTTAKATLTQMLNVIFTRMENQVLQEARELEKPIQSKPQSPVIQAAAVSPKFVRLKHSQAQSKPTTPEKTDLTNGEHARSDSGKVSTENGDAPRERGSSLSGTDDGAQEVVKDILEDVVTSAIKEAAEKHGLTEPERVLGELECQECAIPPGVDENSQTNGIADDRQSLSSADNLESDAQGHQVAARFSHVLQKDAFLVFRSLCKLSMKPLGEGPPDPKSHELRSKVVSLQLLLSVLQNAGPVFRTHEMFINAIKQYLCVALSKNGVSSVPDVFELSLAIFLTLLSNFKMHLKMQIEVFFKEIFLNILETSTSSFEHRWMVIQTLTRICADAQCVVDIYVNYDCDLNAANIFERLVNDLSKIAQGRSGHELGMTPLQELSLRKKGLECLVSILKCMVEWSKDLYVNPNHQTSLGQERLTDQEIGDGKGLDMARRCSVTSMESTVSSGTQTTVQDDPEQFEVIKQKKKIIEHGIELFNKKPKRGIQFLQEQGMLGTSVEDIAQFLHQEERLDSTQVGDFLGDSARFNKEVMYAYVDQLDFCEKEFVSALRTFLEGFRLPGEAQKIDRLMEKFAARYIECNQGQTLFASADTAYVLAYSIIMLTTDLHSPQVKNKMTKEQYIKMNRGINDSKDLPEEYLSSIYEEIEGKKIAMKETKELTIATKSTKQNVASEKQRRLLYNLEMEQMAKTAKALMEAVSHAKAPFTSATHLDHVRPMFKLVWTPLLAAYSIGLQNCDDTEVASLCLEGIRCAIRIACIFGMQLERDAYVQALARFSLLTASSSITKMKQKNIDTIKTLITVAHTDGNYLGNSWHEILKCISQLELAQLIGTGVKTRYLSGSGREREGSLKGHTLAGEEFMGLGLGNLVSGGVNKRQMASFQESVGETSSQSVVVAVDRIFTGSTRLDGNAIVDFVRWLCAVSMDELASPHHPRMFSLQKIVEISYYNMNRIRLQWSRIWHVIGDHFNKVGCNPNEDVAIFAVDSLRQLSMKFLEKGELANFRFQKDFLRPFEHIMKKNRSPTIRDMAIRCIAQMVNSQAANIRSGWKNIFAVFHQAASDHDGNIVELAFQTTCHIVTTIFQHHFPAAIDSFQDAVKCLSEFACNAAFPDTSMEAIRLIRFCGKYVSERPRVLQEYTSDDMNVAPGDRVWVRGWFPILFELSCIINRCKLDVRTRGLTVMFEIMKSYGHTFEKHWWQDLFRIVFRIFDNMKLPEQLSEKSEWMTTTCNHALYAICDVFTQFYEALNEVLLSDVFAQLQWCVKQDNEQLARSGTNCLENLVISNGEKFSPEVWDETCNCMLDIFKTTIPHVLLTWRPVGMEEDSSEKHLDVDLDRQSLSSIDKNPSERGQSQLSNPTDDSWKGRPYANQKLFASLLIKCVVQLELIQTIDNIVFYPATSKKEDAEHMVAAQQDTLDADIHIETEDQGMYKYMSSQHLFKLLDCLQESHSFSKAFNSNYEQRTVLWRAGFKGKSKPNLLKQETSSLACCLRILFRMYVDENRRDSWEEIQQRLLTVCSEALAYFITVNSESHREAWTSLLLLLLTKTLKINDEKFKAHASMYYPYLCEIMQFDLIPELRAVLRKFFLRIGVVYKIWIPEEPSQVPAALSPVW

SEQ ID NO: 2062 - DNA, 2414 bp, Homo sapien
  Unsure 1641: Unknown base
  Unsure 1758: Unknown base
  Unsure 1898: Unknown base
tcatgtcacagccaaagcagagggctggcaggcagcgtgcggcagaagatgcttctcgactacagcgtgtacatgggcaggtgtgtcccccaggaaagccgaagcccccagaggagccccctgcagagtgcggagagcagccccacagctgggaagaagttgccagaggttccaccctctgaggaggaagaacaggaagcctgggtgaatgccttgcttggaagaatattttgggacttcttaggagagaaatactggtctgatctggtgtctaagaagatccaaatgaaactcagccaaataaagctcccctactttaggaatgagctcactctgacggaacttgacatgtgcgtggctttgccaaaaaatcctccgggccttcaagccttacgttgatcaccaaggactctggattgatttggaaatgtcctacaatgggtcctttctgatgactctcgagaccaaaatgaatttgcctaaactaggtaaagagcctcttgttgaagccctgaaggttggagaaattggcaaagaaggttgcaggccccgggcattctgtctggcggacagcgatgaggaatcctccagcgctggctcctccgaggaagacgatgccccagagcccagcgggggagacaaacagctcctcccaggggctgaagggtacgttggaggtcatcgaacaagtaagattatgaggtttgttgataaaattaccaagtcaaaatatttccaaaaagcaacagagacagagtttattaaaaagaagatcgaagaagtctccaacacacccctgctgctcactgttgaagtacaagaatgtagaggaaccttggcggtcaacattccaccacccccgactgaccgagtatggtatggtttccgaaagccaccacatgtggagctgaaagggccaaaacttggagagagagaagtgactttagttcatgtgacagactggatagagaagaaactggagcaagagtttcagaaagtttttgtcatgccaaacatggatgatgtttatatcactataatgcactcagccatggaccctcgctctacttcctgcctcctgaaagacccacctgtggaggctgctgatcagccatgatgggtgatgtcagatgttccccatattgtacatcgagctggatgtgtggggttcttggccgccatctgtactgtagcactggcctctgtgccacagctactgtttcttaaggactgcttctgccctctgcctgccagtgcccattccactgtgaggtgtcattccctgcatctagtgacaactgtctggattgcctgctgcaaacgtttgatttggcaaaggagaccatggaagaatcatggtggatccagaagttatacgtgacccacaccatggcttttaaaagtctacccatgtttgtggcagcaaatgagcacagtaagagcaaagctgaacaacttgcctcctctactcctccaaagcttttcttcaggcagccggtgcacagtggactttttcacttctatactttgtatgcggccttccacacttccagagaatgtcagtgtgcaatgtgtctggagggtggggagaggaattctgtggaggccttttcatttcggtgacagaagagatgggcaganaacttattttccacattaaattgtgcatttgggaagcaagtagccatagtacacacacaacacgctatcagcttgggtaaggacagtgggatttatgtgaacatcatggcaaagcantgagatcaaaccatcccaagcctttcaccaatgaggtacaaccacctgggggctagctaatcttgaatgttttcctgagacaggagcgtatgtgaaaacatcaaacactgcacatgacaggatgggtcctctcatacagntgggatggggttaagaaagccagagccagtttttccatctggcgtttctgtgtcctccaggtttatatgggaatcgaaacagtttgttaatctgattgggagagttccatgggcagatttcccttcctgaaggccaaaacggagaactgctctctttaattatttcaagagtcaagaccaaaagtttgctcagcatcacactacatctcaaaattaatgttgccaacttaattttgtgcatttgtgtcagaatgtttagtttacaaggttgggggctctctttgcttcgagaagtaaacctaataccatttttttattgtttaaagctgcattcaacgtcaaaattaccttgggtaacttttgataacttacatgtgtggacaaagctaatagtggttttttaaacagcaccttgcctgaacatgactttaaagaaattaatatattgaaaacatgtttgaacccttattttaattgcaccattaaaacatttgacttaaaaaaaaaaaaaaaaaa

SEQ ID NO: 2063 - protein, 229 aa, Homo sapien
MSYNGSFLMTLETKMNLPKLGKEPLVEALKVGEIGKEGCRPRAFCLADSDEESSSAGSSEEDDAPEPSGGDKQLLPGAEGYVGGHRTSKIMRFVDKITKSKYFQKATETEFIKKKIEEVSNTPLLLTVEVQECRGTLAVNIPPPPTDRVWYGFRKPPHVELKGPKLGEREVTLVHVTDWIEKKLEQEFQKVFVMPNMDDVYITIMHSAMDPRSTSCLLKDPPVEAADQP

SEQ ID NO: 2064 - DNA, 1741 bp, Homo sapien
gatcgggcggcgccgagctgaggtggtgagggactagctcccggatgtggagaagctggggagaaggcgtgggaggaagatggactcggtggagaagggggccgccacctccgtctccaacccgcgggggcgaccgtcccggggccggccgccgaagctgcagcgcaactctcgcggcggccagggccgaggtgtggagaagcccccgcacctggcagccctaattctggcccggggaggcagcaaaggcatccccctgaagaacattaagcacctggcgggggtcccgctcattggctgggtcctgcgtgcggccctggattcaggggccttccagagtgtatgggtttcgacagaccatgatgaaattgagaatgtggccaaacaatttggtgcacaagttcatcgaagaagttctgaagtttcaaaagacagctctacctcactagatgccatcatagaatttcttaattatcataatgaggttgacattgtaggaaatattcaagctacttctccatgtttacatcctactgatcttcaaaaagttgcagaaatgattcgagaagaaggatatgattctgttttctctgttgtgagacgccatcagtttcgatggagtgaaattcagaaaggagttcgtgaagtgaccgaacctctgaatttaaatccagctaaacggcctcgtcgacaagactgggatggagaattatatgaaaatggctcattttattttgctaaaagacatttgatagagatgggttacttgcagggtggaaaaatggcatactacgaaatgcgagctgaacatagtgtggatatagatgtggatattgattggcctattgcagagcaaagagtattaagatatggctattttggcaaagagaagcttaaggaaataaaacttttggtttgcaatattgatggatgtctcaccaatggccacatttatgtatcaggagaccaaaaagaaataatatcttatgatgtaaaagatgctattgggataagtttattaaagaaaagtggtattgaggtgaggctaatctcagaaagggcctgttcaaagcagacgctgtcttctttaaaactggattgcaaaatggaagtcagtgtatcagacaagctagcagttgtagatgaatggagaaaagaaatgggcctgtgctggaaagaagtggcatatcttggaaatgaagtgtctgatgaagagtgcttgaagagagtgggcctaagtggcgctcctgctgatgcctgttctactgcccagaaggctgttggatacatttgcaaatgtaatggtggccgtggtgccatccgagaatttgcagagcacatttgcctactaatggaaaaggttaataattcatgccaaaaatagaaattagcgtaatattgagaaaaaaatgatacagccttcttcagccagtttgcttttatttttgattaagtaaattccatgttgtaatgttacagagagtgtgatttggtttgtgatatatatatattgtgctctacttttctctttacgcaagataattatttagagactgattacagtctttctcagatttttagtaaatgcaagtaagaacatcatcaaagttcactttgtattgtaccctgtaaaactgtgtgtttgtgtgctttcaaagatgttgggattttatttatctggggacagtgtgtatggtaagacatgcccttctattaataaaactacatttctcaaacttga

SEQ ID NO: 2065 - protein, 434 aa, Homo sapien
MDSVEKGAATSVSNPRGRPSRGRPPKLQRNSRGGQGRGVEKPPHLAALILARGGSKGIPLKNIKHLAGVPLIGWVLRAALDSGAFQSVWVSTDHDEIENVAKQFGAQVHRRSSEVSKDSSTSLDAIIEFLNYHNEVDIVGNIQATSPCLHPTDLQKVAEMIREEGYDSVFSVVRRHQFRWSEIQKGVREVTEPLNLNPAKRPRRQDWDGELYENGSFYFAKRHLIEMGYLQGGKMAYYEMRAEHSVDIDVDIDWPIAEQRVLRYGYFGKEKLKEIKLLVCNIDGCLTNGHIYVSGDQKEIISYDVKDAIGISLLKKSGIEVRLISERACSKQTLSSLKLDCKMEVSVSDKLAVVDEWRKEMGLCWKEVAYLGNEVSDEECLKRVGLSGAPADACSTAQKAVGYICKCNGGRGAIREFAEHICLLMEKVNNSCQK

SEQ ID NO: 2066 - DNA, 1636 bp, Homo sapien
gggctgactggaggctggcggacaggcgacagacctgcggcaggaccagaggagcgagacgagcaagaaccacacccagcagcaatgtcagcggaagtggaaacctcagagggggtagacgagtcagaaaaaaagaactctggggccctagaaaaggagaaccaaatgagaatggctgacctctcggagctcctgaaggaagggaccaaggaagcacacgaccgggcagaaaacacccagtttgtcaaggacttcttgaaaggcaacattaagaaggagctgtttaagctggccaccacggcactttacttcacatactcagccctcgaggaggaaatggagcgcaacaaggaccatccagcctttgcccctttgtacttccccatggagctgcaccggaaggaggcgctgaccaaggacatggagtatttctttggtgaaaactgggaggagcaggtgcagtgccccaaggctgcccagaagtacgtggagcggatccactacatagggcagaacgagccggagctactggtggcccatgcatacacccgctacatgggggatctctcggggggccaggtgctgaagaaggtggcccagcgagcactgaaactccccagcacaggggaagggacccagttctacctgtttgagaatgtggacaatgcccagcagttcaagcagctctaccgggccaggatgaacgccctggacctgaacatgaagaccaaagagaggatcgtggaggaggccaacaaggcttttgagtataacatgcagatattcaatgaactggaccaggccggctccacactggccagagagaccttggaggatgggttccctgtacacgatgggaaaggagacatgcgtaaatgccctttctacgctgctgaacaagacaaaggtgccctggagggcagcagctgtcccttccgaacagctatggctgtgctgaggaagcccagcctccagttcatcctggccgctggtgtggccctagctgctggactcttggcctggtactacatgtgaagcacccatcatgccacaccggtaccctcctcccgactgaccactggcctacccctttctccagccctgactaaactaccacctcaggtgactttttaaaaaatgctgggtttaagaaaggcaaccaataaaagagatgctagagcctcgtctgacagcatcctctctatgggccatattccgcactgggcacaggccgtcaccctgggagcagtcggcacagtgcagcaagcctggcccccgacccagctctactccaggcttccacacttctgggccctaggctgcttccggtagtccctgtttttgcagtacatgggtgactatctcccctgttggaggtgagtggcctgtaagtccaagctgtgcgagggggccttgctggatgctgctgtacaacttctgggcctctcttggaccctgggagtgagggtgggtgtgggtggaagcctcagaggccttgggagctcatccctctcacccagaatccctctaacccttgggtgcggtttgctcagccccagcttatctcctcctccgcctgtgtaaatgctccagcactcaataaagtgggctttgcaagctaaaaaaaaaaaaaaaa

SEQ ID NO: 2067 - protein, 316 aa, Homo sapien
MSAEVETSEGVDESEKKNSGALEKENQMRMADLSELLKEGTKEAHDRAENTQFVKDFLKGNIKKELFKLATTALYFTYSALEEEMERNKDHPAFAPLYFPMELHRKEALTKDMEYFFGENWEEQVQCPKAAQKYVERIHYIGQNEPELLVAHAYTRYMGDLSGGQVLKKVAQRALKLPSTGEGTQFYLFENVDNAQQFKQLYRARMNALDLNMKTKERIVEEANKAFEYNMQIFNELDQAGSTLARETLEDGFPVHDGKGDMRKCPFYAAEQDKGALEGSSCPFRTAMAVLRKPSLQFILAAGVALAAGLLAWYYM

SEQ ID NO: 2068 - DNA, 2251 bp, Homo sapien
gacgtcacggtcactgacagcgtgagcccgcggcggctgctgccatggtggctggcggccgggtaagggtctgagtggatctcctgccaggccagagcgccttcgggggccgcggcggaaggccaggagtttgcagccagggcgccgggtttgtggtctgcagtgtcgtgaggctgaggtgcagcatgtctagactgggagccctgggtggtgcccgtgccgggctgggactgttgctgggtaccgccgccggccttggattcctgtgcctcctttacagccagcgatggaaacggacccagcgtcatggccgcagccagagcctgcccaactccctggactatacgcagacttcagatcccggacgccacgtgatgctcctgcgggctgtcccaggtggggctggagatgcctcagtgctgcccagccttccacgggaaggacaggagaaggtgctggaccgcctggactttgtgctgaccagccttgtggcgctgcggcgggaggtggaggagctgagaagcagcctgcgagggcttgcgggggagattgttggggaggtccgatgccacatggaagagaaccagagagtggctcggcggcgaaggtttccgtttgtccgggagaggagtgactccactggctccagctctgtctacttcacggcctcctcgggagccacgttcacagatgctgagagtgaagggggttacacaacagccaatgcggagtctgacaatgagcgggactctgacaaagaaagtgaggacggggaagatgaagtgagctgtgagactgtgaagatggggagaaaggattctcttgacttggaggaagaggcagcttcaggtgcctccagtgccctggaggctggaggttcctcaggcttggaggatgtgctgcccctcctgcagcaggccgacgagctgcacaggggtgatgagcaaggcaagcgggagggcttccagctgctgctcaacaacaagctggtgtatggaagccggcaggactttctctggcgcctggcccgagcctacagtgacatgtgtgagctcactgaggaggtgagcgagaagaagtcatatgccctagatggaaaagaagaagcagaggctgctctggagaagggggatgagagtgctgactgtcacctgtggtatgcggtgctttgtggtcagctggctgagcatgagagcatccagaggcgcatccagagtggctttagcttcaaggagcatgtggacaaagccattgctctccagccagaaaaccccatggctcactttcttcttggcaggtggtgctatcaggtctctcacctgagctggctagaaaaaaaaactgctacagccttgcttgaaagccctctcagtgccactgtggaagatgccctccagagcttcctaaaggctgaagaactacagccaggattttccaaagcaggaagggtatatatttccaagtgctacagagaactagggaaaaactctgaagctagatggtggatgaagttggccctggagctgccagatgtcacgaaggaggatttggctatccagaaggacctggaagaactggaagtcattttacgagactaaccacgtttcactggccttcatgacttgatgccactatttaaggtgggggggcggggaggcttttttccttagaccttgctgagatcaggaaaccacacaaatctgtctcctgggtctgactgctacccactaccactccccattagttaatttattctaacctctaacctaatctagaattggggcagtactcatggcttccgtttctgttgttctctcccttgagtaatctcttaaaaaaatcaagattcacacctgccccaggattacacatgggtagagcctgcaagacctgagaccttccaattgctggtgaggtggatgaacttcaaagctataggaacaaagcacataacttgtcactttaatctttttcactgactaataggactcagtacatatagtcttaagatcataccttacctaccaaggtaaaaagagggatcagagtggcccacagacattgctttcttatcacctatcatgtgaattctacctgtattccagggctggaccacttgataacttccagtgtcctggcagcttttggaatgacagcagtggtatggggtttatgatgctataaaacaatgtctgaaaagttgcctagaatatattttgttacaaacttgaaataaaccaaatttgatgtt

SEQ ID NO: 2069 - protein, 470 aa, Homo sapien
MSRLGALGGARAGLGLLLGTAAGLGFLCLLYSQRWKRTQRHGRSQSLPNSLDYTQTSDPGRHVMLLRAVPGGAGDASVLPSLPREGQEKVLDRLDFVLTSLVALRREVEELRSSLRGLAGEIVGEVRCHMEENQRVARRRRFPFVRERSDSTGSSSVYFTASSGATFTDAESEGGYTTANAESDNERDSDKESEDGEDEVSCETVKMGRKDSLDLEEEAASGASSALEAGGSSGLEDVLPLLQQADELHRGDEQGKREGFQLLLNNKLVYGSRQDFLWRLARAYSDMCELTEEVSEKKSYALDGKEEAEAALEKGDESADCHLWYAVLCGQLAEHESIQRRIQSGFSFKEHVDKAIALQPENPMAHFLLGRWCYQVSHLSWLEKKTATALLESPLSATVEDALQSFLKAEELQPGFSKAGRVYISKCYRELGKNSEARWWMKLALELPDVTKEDLAIQKDLEELEVILRD

SEQ ID NO: 2070 - DNA, 1575 bp, Homo sapien
agcttttattttctcctctccagtggggttggcttttattgtttcttgtttgggtttggaatggaaatatggatagcagcataaagtacttttattttgacaaaattcatttttttcaacaatggagacatagatttgacccacaataacttctccccctctctttttactctgctcaaaaagcatctctcctcccattacccaaccttggtcataagtgtgcctggctggtttgcagatatttgttctgctttgtaaaaattggccattagtgcatttattgagatgatctctaaagagctatgccctgacctacccctgattctatgacattggggcccttcttttgctgaaactgccttacgtaatggttttactccttgaaagagatttgacggaatccattttatgccaagtgctgccctgcactgtttctgcaatatgtggtgtatgctgtggtgatcttgctgggaatgattataagtgtgtgtgtgatgggggagtgggtattacatgcattgctgaagagtcatcctggtgttcctcattcctcccaccttcccgtggtcattttaattacggggcagtgtcaccgcaaagggaggaaactcaaagccgaaagcaaaattccaggcctgattctggcttttgaggttcctggttcttgaagccaggcctgacccgactctcagatggggtcagtcccgtcgctttgcagactgaccctggaaatctacaaaatgcagattttcctgatttcctcttctcttgcccagtttttttttttttttttttttttttttttaaagcctggattgtaaccagattttcttttttcccccttctcagctgtagatatgatatctcctttcagggccccagcttaagggcaaagtgagttaatgtgtagacaaaggcgagggacaagagagagttaacatctagacagtggaaaaagccatggtgtgtggtttctgggaaccaccaacacttgcaggtttagctttttcccagggttgactacaagaaagaaaaccatgtttttgcaagattaaaatgtggttgagtgtgcctaaattaaccatccccatttttatcatatttccaccatcacttcagggttttaagagtcagtgctcacctgggcggagctggtagtacattttgcttcttagaaagctaagtcctgggttccgtctgattttaggttccaggaacttcctgagaacacccgatcgcagagggtaattttctggagtttgttttgcagggatagctgggagtatggccaccctgctccacgatgcggtaatgaatccagcagaagtggtgaagcagcgcttgcagatgtacaactcgcagcaccggtcagcaatcagctgcatccggacggtgtggaggaccgaggggttgggggccttctaccggagctacaccacgcagctgaccatgaacatccccttccagtccatccacttcatcacctatgagttcctgcaggagcaggtcaacccccaccggacctacaacccgcagtcccacatcatctcaggcgggctggccggggccctcgcc

SEQ ID NO: 2071 - protein, 94 aa, Homo sapien
MVLLLERDLTESILCQVLPCTVSAICGVCCGDLAGNDYKCVCDGGVGITCIAEESSWCSSFLPPSRGHFNYGAVSPQREETQSRKQNSRPDSGF

SEQ ID NO: 2072 - DNA, 1668 bp, Homo sapien
ggcgaaggagatcagcaggacgctgcgcacaacatgggcaaccacctgccgctcctgcctgcagagagtgaggaagaagatgaaatggaagttgaagaccaggatagtaaagaagccaaaaaaccaaacatcataaattttgacaccagtctgccgacatcacatacatacctaggtgctgatatggaagaatttcatggcaggactttgcacgatgacgacagctgtcaggtgattccagttcttccacaagtgatgatgatcctgattcccggacagacattacctcttcagctttttcaccctcaagaagtcagtatggtgcggaatttaattcagaaagatagaacctttgctgttcttgcatacagcaatgtacaggaaagggaagcacagtttggaacaacagcagagatatatgcctatcgagaagaacaggattttggaattgagatagtgaaagtgaaagcaattggaagacaaaggttcaaagtccttgagctaagaacacagtcagatggaatccagcaagctaaagtgcaaattcttcccgaatgtgtgttgccttcaaccatgtctgcagttcaattagaatccctcaataagtgccagatatttccttcaaaacctgtctcaagagaagaccaatgttcatataaatggtggcagaaataccagaagagaaagtttcattgtgcaaatctaacttcatggcctcgctggctgtattccttatatgatgctgagaccttaatggacagaatcaagaaacagctacgtgaatgggatgaaaatctaaaagatgattctcttccttcaaatccaatagatttttcttacagagtagctgcttgtcttcctattgatgatgtattgagaattcagctccttaaaattggcagtgctatccagcgacttcgctgtgaattagacattatgaataaatgtacttccctttgctgtaaacaatgtcaagaaacagaaataacaaccaaaaatgaaatattcagtttatccttatgtgggccgatggagcttatgtgaatcctcatggatatgtgcatgagacacttactgtgtataaggcttgcaacttgaatctgataggccggccttctacagaacacagctggtttcctgggtatgcctggactgttgcccagtgtaagatctgtgcaagcccatattggatgggaagtttacggccaccaaaaaagacatgtcacctcaaaaattttggggcttaacgcgatctgctctgttgcccacgatcccagacactgaagatgaaataagtccagacaaagtaatactttgcttgtaaacagatgtgatagagataaagttatctaacaaattggttatattctaagatctgctttggaaattattgcctctgatacatacctaagtaaacataacattaatacctaagtaaacataacattacttggagggttgcagtttctaagtgaaactgtatttgaaacttttaagtatactttaggaaacaagcatgaacggcagtctagaataccagaaacatctacttgggtagcttggtgccattatcctgtggaatctgatatgtctggtagcatgtcattgatgggacatgaagacatctttggaaatgatgagattatttcctgtgttaaaaaaaaaaaa

SEQ ID NO: 2073 - protein, 336 aa, Homo sapien
MGNHLPLLPAESEEEDEMEVEDQDSKEAKKPNIINFDTSLPTSHTYLGADMEEFHGRTLHDDDSCQVIPVLPQVMMILIPGQTLPLQLFHPQEVSMVRNLIQKDRTFAVLAYSNVQEREAQFGTTAEIYAYREEQDFGIEIVKVKAIGRQRFKVLELRTQSDGIQQAKVQILPECVLPSTMSAVQLESLNKCQIFPSKPVSREDQCSYKWWQKYQKRKFHCANLTSWPRWLYSLYDAETLMDRIKKQLREWDENLKDDSLPSNPIDFSYRVAACLPIDDVLRIQLLKIGSAIQRLRCELDIMNKCTSLCCKQCQETEITTKNEIFSLSLCGPMELM

SEQ ID NO: 2074 - DNA, 1843 bp, Homo sapien
agtcgtaggcgctggccgctgacatgttgaggactacgcgcggcccaggcctgggccccccgctgctccaggccgcgctgggccttgggcgggctgggtggcactggcctgcgggccgggcggcgagcggggggcgcgggcgggcctggctgcagcccacgggccgggagacgggtgtgcaggtgtacaacagcctcaccgggaggaaggaacccctaatcgtggcgcacgccgaagccgcctcctggtatagctgtggaccaactgtatatgatcatgcgcaccttggccatgcttgctcatatgttagatttgatatcattcgaaggatcctaaccaaggtttttggatgcagcatagtcatggtgatgggtattacagatgtagatgataaaatcatcaaaagagccaatgagatgaatatttcccccgcttccctcgccagtctttatgaggaagacttcaagcaggacatggcagccctgaaggttctcccacccacggtgtacctgagggtaaccgaaaatattcctcagataatttctttcattgaaggaatcattgctcgtgggaacgcttattcaacggcaaaaggcaatgtctacttcgatctgaagtctagaggagacaagtatggcaaattggtcggcgtggtccctggtccagtcggagagccagcggactctgacaagcgtcatgccagtgacttcgccctgtggaaggcggccaaaccccaggaggtgttctgggcctctccctggggacccgggaggccgggctggcacatcgagtgctctgccatcgctagtatggtatttggaagtcaactggatatccattcaggtgggatagatttagcttttccacatcatgagaacgaaattgcacagtgcgaagtctttcatcagtgcgagcagtggggaaattattttctgcattctgggcatttgcacgccaaaggcaaagaagaaaaaatgtccaaatcattaaagaactacattactattaaggactttctgaagaccttttcccccgatgtcttccggttcttctgcctgcggagcagctaccgctcagccatcgactacagtgacagcgccatgctccaagctcagcagctgctcctggggctgggctctttcctggaggacgcacgtgcctacatgaaggggcagctggcctgcggctccgtcagggaagcgatgctgtgggagaggctctccagcaccaagagggccgtgaaggcggccttggcagatgattttgacacacccagggtggttgatgccatcctgggccttgcacaccacgggaatggacagctcagggcgtccctgaaggaacctgaagggccgagaagtcctgctgtgtttggtgccatcatctcttactttgaacagttttttgaaactgttggaatttctctggcaaatcaacagtacgtttcaggagacggcagcgaggctaccttgcatggtgtggtggacgagctggtgcggttccggcagaaggtccggcagtttgcgctggccatgcccgaggccacgggggacgcccggcggcagcagctcctagaaaggcagcccctgctggaagcatgcgacaccctgcgccggggcctgactgcccacggcatcaacatcaaggacagaagcagtacaacatccacgtgggaactgctggatcaaaggacaaaagaccaaaaatcagcgggctgaggatggagcacagccatgaacctgctcacgacaagacgcacccatgcttctcagggtcaaggctttatgttaaagcttcctgtcggggctgctaggtcagcattaaagtaaggcaaccaacagtg

SEQ ID NO: 2075 - protein, 564 aa, Homo sapien
MLRTTRGPGLGPPLLQAALGLGRAGWHWPAGRAASGGRGRAWLQPTGRETGVQVYNSLTGRKEPLIVAHAEAASWYSCGPTVYDHAHLGHACSYVRFDIIRRILTKVFGCSIVMVMGITDVDDKIIKRANEMNISPASLASLYEEDFKQDMAALKVLPPTVYLRVTENIPQIISFIEGIIARGNAYSTAKGNVYFDLKSRGDKYGKLVGVVPGPVGEPADSDKRHASDFALWKAAKPQEVFWASPWGPGRPGWHIECSAIASMVFGSQLDIHSGGIDLAFPHHENEIAQCEVFHQCEQWGNYFLHSGHLHAKGKEEKMSKSLKNYITIKDFLKTFSPDVFRFFCLRSSYRSAIDYSDSAMLQAQQLLLGLGSFLEDARAYMKGQLACGSVREAMLWERLSSTKRAVKAALADDFDTPRVVDAILGLAHHGNGQLRASLKEPEGPRSPAVFGAIISYFEQFFETVGISLANQQYVSGDGSEATLHGVVDELVRFRQKVRQFALAMPEATGDARRQQLLERQPLLEACDTLRRGLTAHGINIKDRSSTTSTWELLDQRTKDQKSAG

SEQ ID NO: 2076 - DNA, 2235 bp, Homo sapien
cattaacctgctggattacctgccggagatcctggatggactcttccagatcctgggtgacaatggcaaagagattcgcaaaatgtgtgaggttgttcttggagaattcttaaaagaaattaagaagaacccctccagtgtgaagtttgctgagatggccaacatcctggtgatccactgccagacaacagatgacctcatccagctgacagccatgtgctggatgcgggagttcatccagctggcgggccgcgtcatgctgccttactcctccgggatcctgactgctgtcttgccctgcttggcctacgatgaccgcaagaaaagcatcaaagaagtggccaacgtgtgcaaccagagcctgatgaagctggtcacccccgaggacgacgagctggatgagctgagacctgggcagaggcaggcagagcccacccctgacgatgccctgccaaagcaggagggcacagccagtggaggtccagatggttcctgtgactccagcttcagtagcggcatcagtgtcttcactgcagccagcactgaaagagccccagtgacccttcacctcgacgggatcgtgcaggtcctaaactgccacctcagtgacacggccattgggatgatgaccaggattgcagttctcaagtggctctaccacctctacatcaaaactcctcggaagatgttccggcacacggacagcctctttcccatcctactgcagacgttatcggatgaatcggatgaggtgatcctgaaggacctggaggtgctggcagaaatcgcttcctcccccgcaggccagacggatgacccaggccccctcgatggccctgacctccaggccagccactcagagctccaggtgcccacccctggcagagccggcctactgaacacctctggtaccaaaggcttagaatgttctccttcaactcccaccatgaattcttacttttataagttcatgatcaaccttctcaagagattcagcagcgaacggaagctcctggaggtcagaggccctttcatcatcaggcagctgtgcctcctgctgaatgcggagaacatcttccactcaatggcagacatcctgctgcgggaggaggacctcaagttcgcctcgaccatggtccacgccctcaacaccatcctgctgacctccacagagctcttccagctaaggaaccagctgaaggacctgaagaccctggagagccagaacctgttctgctgcctgtaccgctcctggtgccacaacccagtcaccacggtgtccctctgcttcctcacccagaactaccggcacgcctatgacctcatccagaagtttggggacctggaggtcaccgtggacttcctcgcagaggtggacaagctggtgcagctgattgagtgccccatcttcacatatctgcgcctgcagctgctggacgtgaagaacaacccctacctgatcaaggccctctacggcctgctcatgctcctgccgcagagcagcgccttccagctgctctcgcaccggctccagtgcgtgcccaaccctgagctgctgcagaccgaagacagtctaaaggcagcccccaagtcccagaaagctgactcccctagcatcgactacgcagagctgctgcagcactttgagaaggtccagaacaagcacctggaagtgcggcaccagcggagcgggcgtggggaccacctggaccggagggttgtcctctgacaggcctggcacggaggagggcccaccgagtggtcccatgaaacactaagggtcgtcacgccctcccgaggagctcaaggacctgcctgtcaggaccagggctgggcctgccaacccagggcagtgttggggccggaggctgctgtgtctgcccaagctcctctcagagtccagtccccaggcctccagcgctgtcagctgcaccctggcattctcacagagctggctgcccacccagtggggggctatagcctcagagaccactcatcctctggaatcaacctctttctaataccctcttggaaaaagagcttgcccctcctccagcacactagagctctggccttgtgtgtatatgtatacatacgtgaacacatgcctgtgtgtgtgtgtgtgtgtgtgtacttgtatgcacgtaggcaccagcacaaagatctgaatgatgcaccccacccccaccccaataaagaaataacagaaaaccctcaaaaaaaaaaaaaaaaaaa

SEQ ID NO: 2077 - protein, 524 aa, Homo sapien
MANILVIHCQTTDDLIQLTAMCWMREFIQLAGRVMLPYSSGILTAVLPCLAYDDRKKSIKEVANVCNQSLMKLVTPEDDELDELRPGQRQAEPTPDDALPKQEGTASGGPDGSCDSSFSSGISVFTAASTERAPVTLHLDGIVQVLNCHLSDTAIGMMTRIAVLKWLYHLYIKTPRKMFRHTDSLFPILLQTLSDESDEVILKDLEVLAEIASSPAGQTDDPGPLDGPDLQASHSELQVPTPGRAGLLNTSGTKGLECSPSTPTMNSYFYKFMINLLKRFSSERKLLEVRGPFIIRQLCLLLNAENIFHSMADILLREEDLKFASTMVHALNTILLTSTELFQLRNQLKDLKTLESQNLFCCLYRSWCHNPVTTVSLCFLTQNYRHAYDLIQKFGDLEVTVDFLAEVDKLVQLIECPIFTYLRLQLLDVKNNPYLIKALYGLLMLLPQSSAFQLLSHRLQCVPNPELLQTEDSLKAAPKSQKADSPSIDYAELLQHFEKVQNKHLEVRHQRSGRGDHLDRRVVL

SEQ ID NO: 2078 - DNA, 1814 bp, Homo sapien
atgggccacgggcccccaccgccgcccgccgggaggaccgagcctaagagggcagccgcctgaaggaacgcgacggcggcgcccgcagtatttttcagtgctgtacaagcgtcttgaattactctggtagcttttccagaaagacccatgacttcaccacatttctcgagttacgatgaaggtcctctggatgtcagcatggcagccacaaacctggagaaccagctgcacagcgcacagaagaacctcctgttccttcagcgggagcatgccagcacgctcaaggggctgcactccgagatcaggcggctgcagcagcactgcacagatttaacatatgagctgacagtcaaaagttcggaacagacaggagacgggacttctaaaagcagtgaattaaagaaaagatgtgaagagctggaagcccaactgaaagtgaaagagaacgaaaatgctgagttgttgaaagaactggagcagaaaaacgcgatgatcacagtgctggagaacaccatcaaggagcgagagaagaagtacctggaggagctgaaggccaagagtcacaagctgaccctgctgtctagcgagctggagcagcgggccagcaccatcgcctacctgacctcccagctgcacgccgccaagaagaagctcatgagctccagcgggacctcagatgccagcccgtcagggagccccgtgctggccagctacaagccagcgccccccaaagacaagctacccgaaacgcctcgccgccgcatgaaaaagagcctctcagcccccttgcacccggaatttgaagaggtctacagattcggggcagagagcaggaaactccttttgcgggaaccagtggatgctatgcccgaccccaccccatttctgctggctagggagtccgccgaggtccacctcatcaaagagaggcccctcgtcatcccccccatcgcctccgaccgaagcggcgagcagcacagcccggcccgcgaaaagccgcacaaggcccacgtcggggtggcacatcggatccaccacgccaccccgccgcaggcccagcccgaggtgaagaccctggcggtcgaccaggtgaacggaggcaaggtggtgaggaagcactcagggacggacagaactgtgtgaagcccgccgtgccccaccccgcgctgtccatgcactgtgagcaccactgggaaatctcagccacaccttttctgtttaatcccatgcatgccaaacacttttcacacctaccgacccattctccttctgcttctcttgccctcttcttcacaccaaaatatgatcgtgtccctgccgcagaatatgtatttcctaattgctgtggccaagcgcctgtgtgccgaatcgcttgcttctgatcccgctccgtgtaacctaagtgcgctgcaggcaaagcccaggccacggctgcgtcactactgatgttcacgatgccacacagtcacacacctaattcattctcaagtcggagcaacacataccaaccttgaccttatcctcaagctccagggcagcctggccgagcagcccctgctccctcctggagacccttgtcacctcccgagctcctcctggagacccctgtcacctcctgaccaacctttcccagggcggcaccgatcaccgagcagccgtgcgtgtatctcaaggaactaaataagatgacgctactcctcatagcaccacaacctgaatgtgtgttcatatttttttgttagttttatccaaaatgtttaagatcccaacaaactttattttctaaacctgccaaaaaaaaaaaaaaaaaaaaa

SEQ ID NO: 2079 - protein, 331 aa, Homo sapien
MTSPHFSSYDEGPLDVSMAATNLENQLHSAQKNLLFLQREHASTLKGLHSEIRRLQQHCTDLTYELTVKSSEQTGDGTSKSSELKKRCEELEAQLKVKENENAELLKELEQKNAMITVLENTIKEREKKYLEELKAKSHKLTLLSSELEQRASTIAYLTSQLHAAKKKLMSSSGTSDASPSGSPVLASYKPAPPKDKLPETPRRRMKKSLSAPLHPEFEEVYRFGAESRKLLLREPVDAMPDPTPFLLARESAEVHLIKERPLVIPPIASDRSGEQHSPAREKPHKAHVGVAHRIHHATPPQAQPEVKTLAVDQVNGGKVVRKHSGTDRTV

SEQ ID NO: 2080 - DNA, 1113 bp, Homo sapien
ggggcgacgtttagcgactattgcgcctgcgccagcgccggctgcgagactggggccgtggctgctggtcccgggtgatgctaggcggctccctgggctccaggctgttgcggggtgtaggtgggagtcacggacggttcggggcccgaggtgtccgcgaaggtggcgcagccatggcggcaggggagagcatggctcagcggatggtctgggtggacctggagatgacaggattggacattgagaaggaccagattattgagatggcctgtctgataactgactctgatctcaacattttggctgaaggtcctaacctgattataaaacaaccagatgagttgctggacagcatgtcagattggtgtaaggagcatcacgggaggtctggccttaccaaggcagtgaaggagagtacaattacattgcagcaggcagagtatgaatttctgtcctttgtacgacagcagactcctccagggctctgtccacttgcaggaaattcagttcatgaagataagaagtttcttgacaaatacatgccccagttcatgaaacatcttcattatagaataattgatgtgagcactgttaaagaactgtgcagacgctggtatccagaagaatatgaatttgcaccaaagaaggctgcttctcatagggcacttgatgacattagtgaaagcatcaaagagcttcagttttaccgaaataacatcttcaagaaaaaaatagatgaaaagaagaggaaaattatagaaaatggggaaaatgagaagaccgtgagttgatgccagttatcatgctgccactacatcgttatctggaggcaacttctggtggtttttttttctcacgctgatggcttggcagagcaccttcggttaacttgcatctccagattgattactcaagcagacagcacacgaaatactatttttctcctaatatgctgtttccattatgacacagcagctcctttgtaagtaccaggtcatgtccatcccttggtacatatatgcatttgcttttaaaccatttcttttgtttaaataaataaataagtaaataaagctagttctattgaaatgcaaaaaaaaaaaaaaaaaaaaa

SEQ ID NO: 2081 - protein, 237 aa, Homo sapien
MLGGSLGSRLLRGVGGSHGRFGARGVREGGAAMAAGESMAQRMVWVDLEMTGLDIEKDQIIEMACLITDSDLNILAEGPNLIIKQPDELLDSMSDWCKEHHGRSGLTKAVKESTITLQQAEYEFLSFVRQQTPPGLCPLAGNSVHEDKKFLDKYMPQFMKHLHYRIIDVSTVKELCRRWYPEEYEFAPKKAASHRALDDISESIKELQFYRNNIFKKKIDEKKRKIIENGENEKTVS

SEQ ID NO: 2082 - DNA, 2411 bp, Homo sapien
atttccttaatctatttaatcacaccctgacctgctttgaacataaccttcaggggaatgcacatagtcttttacagacaaaaaattattcagaagtatgcaaaaaactgccgtgaagcatacaaaactctgagtagtctgtacagtgaaatgcaaaaaatgaatgaacttgagaataaggctgaacctggaacacatttatgcattgatgtggaagatgcaatgaacatcactcgaaaactatggagtcgaactttcaactgttcagtcccttgcagtgacacagtgcctgtaattgctgtttctgtgttcattctctttctacctgttgtcttctaccttagtagctttcttcactcagagcaaaagaaacgcaaactcattctgcccaaacgtctcaagtccagtaccagttttgcaaatattcaggaaaattcaaactgagacctacaaaatggagaattgacatatcacgtgaatgaatggtggaagacacaacttggtttcagaaagaagataaactgtgatttgacaagtcaagctcttaagaaatacaaggacttcagatccatttttaaataagaattttcgatttttctttccttttccacttctttctaacagatttggatatttttaatttccaggcatagcaatgttatctattttaatgtgtatttgtcacaataacagaacatgcaagaacaatcattattttattttataggcatttgattactattctagacttctggtatcttcttactaacataaatatctcaagtagaaaagtttttgaaaactaacatttaaaaattaatcagttacagtaaagactttgaaaaagaaatgtacttgttaggaagtagcttaattaccccccattgcagtattattgttatatatatagttaatatgttgtacatcacaataatatataattcagtctctagtttccctagagtcatttttgaaaccactgattgcaaacctccctgacaatttttaaaagtagtaagccacattacatttatctttgtaaaaagatttatggtaactggtttcttacttgacttttataaatagtattttacatcttatttttgcctttatttcataagtaatttaaaaatcactggattgctttattatattcagggcaatatggattatttttataccaaggatttgcatcgtgaattacattaagttatttggcaatttataatttattactactttaaatcaaatgtagcattatcacactgtatttaaattgtcattttttaaaggaatattttcttcttaagatatatagaggattttggagaagagagacaggaggggtaaaaccagcttaaggttcagcgagcagaaagggacctgagaggatgctcactgtaagactgttggacagtggtgtgtattgaggggatgaatcggaacgatagtctcatgcagaaaatagtgagattaagatcatccttattgtttctaaattatttcaatcagatgaaagtgatacgattgaaatgaaatcacatagttcgtgctcagaaattctattttggtatgtttgtattagcctttagaaaaaacactccgtttcagaattgttcacagttttatttcttaggtttttagagttcaggatttcatttattaatttcttcttgcttttttggtggaaataggctttgttgtaaacattaagaatataaaatctcctctatatagaaacaagaattttgttaaaaagagaatttgaatcccttcctatactataaaatgctctatagggagacaaagtgtttcttttttcttttatgtttactgtttatgtggagtgaaatataaggctcttggatgtataacatactcaaaagctgttacactttctctgatctgctgtgatccactgaaaatgtgctggggtttgttctgctgtcactgtttatgctgctggaacttagcactgtcttgatttgaagcatatgattgagagccatttgaagcaatcttcattaatgcagataaaacaagtttacatgtgcagagttagaaaatgacatgttcaattctgtaagtggtgactttttgagcacctttcagtattatgtatttgtaaaaaccattgtttttggatataaagctaataagcactttaaaaaggaaaaggcagcctttactattttttctggttgagtcattgctctttagacctagcatcagcaatagatttcaaagataagtattaagcgctaccctaaagtgtgtaagtttttcattttgtcatattgaaaaatgatttgcatagtactgaatgttgacacacagcttatatgtatttacaagaatatctttaagtgtttttttgacacattaaaataaaggaaataaggaaattgtaa

SEQ ID NO: 2083 - protein, 128 aa, Homo sapien
MHIVFYRQKIIQKYAKNCREAYKTLSSLYSEMQKMNELENKAEPGTHLCIDVEDAMNITRKLWSRTFNCSVPCSDTVPVIAVSVFILFLPVVFYLSSFLHSEQKKRKLILPKRLKSSTSFANIQENSN

SEQ ID NO: 2084 - DNA, 1549 bp, Homo sapien
gctggcggggcccggacagaagatggtgcagaagaaaccagccgaacttcagggtttccaccgttcgttcaaggggcagaaccccttcgagctggccttctccctagaccagcccgaccacggagactctgactttggcctgcagtgctcagcccgccctgacatgcccgccagccagcccattgacatcccggacgccaagaagaggggcaagaagaagaagcgcggccgggccaccgacagcttctcgggcaggtttgaagacgtctaccagctgcaggaagatgtgctgggggagggcgctcatgcccgagtgcagacctgcatcaacctgatcaccagccaggagtacgccgtcaagatcattgagaagcagccaggccacattcggagcagggttttcagggaggtggagatgctgtaccagtgccagggacacaggaacgtcctagagctgattgagttcttcgaggaggaggaccgcttctacctggtgtttgagaagatgcggggaggctccatcctgagccacatccacaagcgccggcacttcaacgagctggaggccagcgtggtggtgcaggacgtggccagcgccttggactttctgcataacaaaggcatcgcccacagggacctaaagccggaaaacatcctctgtgagcaccccaaccaggtctcccccgtgaagatctgtgacttcgacctgggcagcggcatcaaactcaacggggactgctcccctatctccaccccggagctgctcactccgtgcggctcggcggagtacatggccccggagttagtggaggccttcagcgaggaggctagcatctacgacaagcgctgcgacctgtggagcctgggcgtcatcttgtatatcctactcagcggctacccgcccttcgtgggccgctgtggcagcgactgcggctgggaccgcggcgaggcctgccctgcctgccagaacatgctgtttgagagcatccaggagggcaagtacgagttccccgacaaggactgggcccacatctcctgcgctgccaaagacctcatctccaagctgctggtccgtgacgccaagcagaggctgagtgccgcccaagtcctgcaacacccctgggttcaggggtgcgccccggagaacaccttgcccactcccatggtcctgcagaggtgggacagtcacttcctcctccctccccacccctgtcgcatccacgtgcgacctggaggactggtcagaaccgttactgtgaatgagtgaagatcctggaggaccctggccccaggccagctcccatcgctgggggacggtgaacggccatgtgttaatgttacgatgtttttaaaagacaaaaaaaaaaaaaaaacctcaaaagtttttttaaagtgggggaaaaacatccaagcactttaattccaatgtaccaggtgaactgacggagctcagaagttttcctttacaccaactgtcaatgccggaattttgtattctgttttgtaaagatttaataaaagtcaaaaaacttgcaaaaaaaaaaaaaaa

SEQ ID NO: 2085 - protein, 414 aa, Homo sapien
MVQKKPAELQGFHRSFKGQNPFELAFSLDQPDHGDSDFGLQCSARPDMPASQPIDIPDAKKRGKKKKRGRATDSFSGRFEDVYQLQEDVLGEGAHARVQTCINLITSQEYAVKIIEKQPGHIRSRVFREVEMLYQCQGHRNVLELIEFFEEEDRFYLVFEKMRGGSILSHIHKRRHFNELEASVVVQDVASALDFLHNKGIAHRDLKPENILCEHPNQVSPVKICDFDLGSGIKLNGDCSPISTPELLTPCGSAEYMAPELVEAFSEEASIYDKRCDLWSLGVILYILLSGYPPFVGRCGSDCGWDRGEACPACQNMLFESIQEGKYEFPDKDWAHISCAAKDLISKLLVRDAKQRLSAAQVLQHPWVQGCAPENTLPTPMVLQRWDSHFLLPPHPCRIHVRPGGLVRTVTVNE

SEQ ID NO: 2086 - DNA, 1541 bp, Homo sapien
ctctccgagaactcttgtcagctcacggcagcaaggacggactcgttgtgaaggcgcccacacacttttatgaccacctctttcccagattattcgttttgatgaagctaaaattttaatctaaaaagaaatgcacctcatggagaattcttgtgaagaactgtgcttcatctgtggatttctacacccttgatcatttgcaaacctgtaattatttcgtaaaggcgggatggtgccgctgtgccaggttgaagtattgtattttgcaaaaagtgctgaaataacaggagttcgttcagagaccatttctgtgcctcaagaaataaaagcgttgcagctgtggaaggagatagaaactcgacatcctggattggctgatgttagaaatcagataatatttgctgttcgtcaagaatatgtcgagcttggagatcagctcctcgtgcttcagcctggagacgaaattgccgttatcccccccattagtggaggatagtgcttttgagccatctaggaaagatatggatgaagttgaagagaaatctaaagatgttataaactttactgccgagaaactttcagtagatgaagtctcacagttggtgatttctccgctctgtggtgcaatatccctatttgtagggactacaagaaataactttgaagggaaaaaagtcattagcttagaatatgaagcatatctacccatggcggaaaatgaagtcagaaagatttgtagtgacattaggcagaaatggccagtcaaacacatagcagtgttccatagacttggcttggttccagtgtcagaagcaagcataatcattgctgtgtcctcagcccacagagctgcatctcttgaagctgtgagctatgccattgatactttaaaagccaaggtgcccatatggaaaaaggaaatatacgaagagtcatcaacttggaaaggaaacaaagagtgcttttgggcatccaacagttaatcacttatgtttttagagcatgcaatcttaactttgttaaactattattattgatcacattttgatttttttctctccacatcaggatagtttactgaagcacaatctcttatactagtgggacaaaagggagaaaaaggaagcaagataaatgggtatgtaggatgaagggttatttaaaatggaactaaagatagaaggaggactgtaggaagaaatggaataatttaaatgtgaggaaagatatctgtggtagacatgtccttccatgactaatttctaattgtaactcaacacacattgaggtatgggccctcctcagtgactttaactagctcagaaacgtactcccccaccaaccccacctcaccgccccccatcccggttctgggagagcattgttattaaggatgcatgacaggaatgttggcagaactggaaagtattaaaaaagcattatcagacagtcttgatattatacattttcagaaatatattaaaaataataaactaaaacccatgatttcaaaagtttaaaaaaaaaaaaaaaaaaaaaaa

SEQ ID NO: 2087 - protein, 188 aa, Homo sapien
MSSLEISSSCFSLETKLPLSPPLVEDSAFEPSRKDMDEVEEKSKDVINFTAEKLSVDEVSQLVISPLCGAISLFVGTTRNNFEGKKVISLEYEAYLPMAENEVRKICSDIRQKWPVKHIAVFHRLGLVPVSEASIIIAVSSAHRAASLEAVSYAIDTLKAKVPIWKKEIYEESSTWKGNKECFWASNS

SEQ ID NO: 2088 - DNA, 2530 bp, Homo sapien
  Unsure 722: Unknown base
  Unsure 2090: Unknown base
ccaggcgctgcgcggctgctctggcgtccagtcctacccgcaacccgccgcgacgttactgctcctctgctgccttcgtttctggtcctcggccgtcctcgccgcccgcccagaggagtccccgcgcccgccaagaagccgctttccgctggcccgcagccgccgcgacttcggcacagtttctccctctggctagtctcccaaacggccgctcctcgcccgcgggaagaccaggctgcgaccgcgaacgcccgatcctctccaggagccgcagcgagcgcccggcggccacgccccgcgacacaccccggcggctctcggcccagcgcgcctgccttcgccgccgccgtcgctcctcgcccgctgcacgacgacgcgacgcccctgctgcaggcggcggacccgaccggacccagacccagacgcaagatggcgacggccgcgtgactgcctcagcgtccccgagctcggctccgagtgcacctacggactgactgtgggggcagagaagggcgagatcaggactctgtctttgttaatcgtgactgcatgaaggtcgcctccctcgggcctacttggtgggagtgtctggtattgttctaaggccaggagcacggtgagccacagtctgttggtagaatttggcgtcttgatagttgagaaaatggcgatgacactgttggaagactggtgccgggggatggatgtgaactcccagaganctctgttagtctggggcatcccagtgaactgtgatgaggctgaaatcgaagagaccctccaggctgcgatgccccaggtctcctaccgaatgcttgggagaatgttctggagggaagaaaatgcgaaagcagccttattagagctcactggcgctgtagattacgccgcgatccccagggagatgccgggcaaaggaggggtctggaaagtgttatttaagcccccaacttctgatgctgaatttttagaaagattgcacctcttcctagctagagaggggtggaccgtgcaagatgttgcccgtgtccttgggtttcagaaccctactccgaccccgggcccagagatgccagcagagatgctaaactatattttggataatgttattcagcctcttgttgagtccatatggtacaagaggctgacacttttctcggggagggacatcccagggcctggagaggaaacctttgatccctggctggagcacactaatgaggtcctagaggagtggcaggtgtccgatgtagaaaagaggcggcggttgatggagagtcttagaggccccgccgctgatgttattcgcatccttaagtccaacaaccccgcgataaccactgccgaatgcctgaaggcgcttgagcaggtgtttgggagcgttgagagctctagggatgcccagatcaaatttctgaacacttatcagaacccgggagaaaaattgtctgcttatgtcattcgtctggagcctctgctacagaaggtggtagagaagggggccattgataaagataatgtgaaccaggcccgcctagagcaggtcattgccggggccaaccacagcggggccatccgaaggcagctgtggcttaccggggctggggaagggccagccccaaacctctttcagttgctggtgcagatccgtgaggaggaagccaaggaggaggaggaggaggctgaggccacccttctgcagttaggcctggaagggcacttctgagtgccaggaaaggcagctttagtgcagacctagatcacagctacttttcttgtccctgtggggtcttacagatgtgtctctgagtagtaaaggcttagccttgttctgttttgttgttttttggaggggaaggttagtcaggcctgagtattcatgtaacattctaaaattgtgccagcgagcaccgtgaacgactgcaatgcaagcgggtcttgctggctaaaatgcccaggtaaagggttggttggacacagcgcttagtgcacgctgtcatcatggacatcataatcagttgtgaaaaacacgcgaacctatgacacttcttattccacactgaatgtgaaattgcatgttcagatgtttnactacgaggcctggctcacaggaagtgttcagtaaaagtatgcactgttagattactgataacgcggatagatttttgtttaccataaattgttccagatttatattaatggaaggaagtgtgcatttattagctattactcaactttacaatgcaaacatcttatttctcatctttaaacatgtcgaccagtttaattgaaaagtattctgagactgcaaaatggggtgttaaaaaatactgcagttacggagctgtgtaaaccagtttctcattgcataagatacagatgtaaattgcatggagaggttgatatgcacctgtacagtaattcactcccccatttcacttctttgtcagagaatagttcttgttcatactgagtgttctaaatttgaagttatatatacaaattaaaatattttaaaaaaaaaaaaaag

SEQ ID NO: 2089 - protein, 353 aa, Homo sapien
  unsure 20: unknown amino acid
MAMTLLEDWCRGMDVNSQRXLLVWGIPVNCDEAEIEETLQAAMPQVSYRMLGRMFWREENAKAALLELTGAVDYAAIPREMPGKGGVWKVLFKPPTSDAEFLERLHLFLAREGWTVQDVARVLGFQNPTPTPGPEMPAEMLNYILDNVIQPLVESIWYKRLTLFSGRDIPGPGEETFDPWLEHTNEVLEEWQVSDVEKRRRLMESLRGPAADVIRILKSNNPAITTAECLKALEQVFGSVESSRDAQIKFLNTYQNPGEKLSAYVIRLEPLLQKVVEKGAIDKDNVNQARLEQVIAGANHSGAIRRQLWLTGAGEGPAPNLFQLLVQIREEEAKEEEEEAEATLLQLGLEGHF

SEQ ID NO: 2090 - DNA, 464 bp, Homo sapien
ctcccaagatgtcgttcccaaagtataagccgtcgagcctgcgcactctgcctgagaccctcgacccagccgaatacaacatatctccggaaacccggcgggcgcaagccgagcggttggccataagagcccagctgaaacgagagtacctgcttcagtacaacgatcccaaccgccgagggctcatcgaaaatcctgccttgcttcgttgggcctatgcaagaacaataaatgtctatcctaatttcagacccactcctaaaaactcactcatgggagctctgtgtggatttgggcccctcatcttcatttattatattatcaaaactgagagggataggaaagaaaaacttatccaggaaggaaaattggatcgaacatttcacctctcatattaagtctggcaatgatgactatatgtattcctgcctaaataaatcatctattaatcattaaaaaaaaaa

SEQ ID NO: 2091 - protein, 129 aa, Homo sapien
MSFPKYKPSSLRTLPETLDPAEYNISPETRRAQAERLAIRAQLKREYLLQYNDPNRRGLIENPALLRWAYARTINVYPNFRPTPKNSLMGALCGFGPLIFIYYIIKTERDRKEKLIQEGKLDRTFHLSY

SEQ ID NO: 2092 - DNA, 967 bp, Homo sapien
ggcagaggcatcatggagggtccccggggatggctggtgctctgtgtgctggccatatcgctggcctctatggtgaccgaggacttgtgccgagcaccagacgggaagaaaggggaggcaggaagacctggcagacgggggcggccaggcctcaagggggagcaaggggagccgggggcccctggcatccggacaggcatccaaggccttaaaggagaccagggggaacctgggccctctggaaaccccggcaaggtgggctacccagggcccagcggccccctcggggcccgtggcatcccgggaattaaaggcaccaagggcagcccaggaaacatcaaggaccagccgaggccagccttctccgccattcggcggaaccccccaatggggggcaacgtggtcatcttcgacacggtcatcaccaaccaggaagaaccgtaccagaaccactccggccgattcgtctgcactgtacccggctactactacttcaccttccaggtgctgtcccagtgggaaatctgcctgtccatcgtctcctcctcaaggggccaggtccgacgctccctgggcttctgtgacaccaccaacaaggggctcttccaggtggtgtcagggggcatggtgcttcagctgcagcagggtgaccaggtctgggttgaaaaagaccccaaaaagggtcacatttaccagggctctgaggccgacagcgtcttcagcggcttcctcatcttcccatctgcctgagccagggaaggaccccctcccccacccacctctctggcttccatgctccgcctgtaaaatgggggcgctattgcttcagctgctgaagggagggggctggctctgagagccccaggactggctgccccgtgacacatgctctaagaagctcgtttcttagacctcttcctggaataaacatctgtgtctgtgtctgctgaaaaaaaaaaaaaaaaaa

SEQ ID NO: 2093 - protein, 245 aa, Homo sapien
MEGPRGWLVLCVLAISLASMVTEDLCRAPDGKKGEAGRPGRRGRPGLKGEQGEPGAPGIRTGIQGLKGDQGEPGPSGNPGKVGYPGPSGPLGARGIPGIKGTKGSPGNIKDQPRPAFSAIRRNPPMGGNVVIFDTVITNQEEPYQNHSGRFVCTVPGYYYFTFQVLSQWEICLSIVSSSRGQVRRSLGFCDTTNKGLFQVVSGGMVLQLQQGDQVWVEKDPKKGHIYQGSEADSVFSGFLIFPSA

SEQ ID NO: 2094 - DNA, 1280 bp, Homo sapien
ggctgcgagaagacgacagaagggggaaggggctgatgcgaactggggccacggtagccatcgcgctttgcagttcggtctcctggtgtacggccaacgccaagtaggggattgcgttccctccagtcgcagaccctatcagatttggatatgtccttcatatttgattggatttacagtggtttcagcagtgtgctacagtttttaggattatataagaaaactggtaaactggtatttcttggattggataatgcaggaaaaacaacattgctacacatgctaaaagatgacagacttggacaacatgtcccaacattacatcccacttccgaagaactgaccattgctggcatgacgtttacaacttttgatctgggtggacatgttcaagctcgaagagtgtggaaaaactaccttcctgctatcaatggcattgtatttctggtggattgtgcagaccacgaaaggctgttagagtcaaaagaagaacttgattcactaatgacagatgaaaccattgctaatgtgcctatactgattcttgggaataagatcgacagacctgaagccatcagtgaagagaggttgcgagagatgtttggtttatatggtcagacaacaggaaaggggagtatatctctgaaagaactgaatgcccgacccttagaagttttcatgtgtagtgtgctcaaaagacaaggttacggagaaggcttccgctggatggcacagtacattgattaacacaaactcacattggttccaggtctcaacgttcaggcttactcagagatttgattgctcaacatgcataacttgaattcaatagacttttgctggttataaaacagatgttttttagattattaatattaaatcaacttaatttgaatgagaattgaaaactgattcaagtaagtttgagtatcacaatgttagctttctaattccataaaagtacttggtttttacagtttataatctgacatcaccccagcgccatttgtaaagagcaactttccagcagtacatttgaagcactttttaacaacatgaaactataaaccatatttaaaagctcatcatgttaaattttttatgtacttttctggaactagtttttaaattttagattatatgtccacctatcttaagtgtacagttaataattagcttattcaatgattgcatgatgccttacagttttcaataactttttttcttatgcaaacgtcatgcaataaaacaaactctaatgtttggcaaaaaaaaaaaaa

SEQ ID NO: 2095 - protein, 198 aa, Homo sapien
MSFIFDWIYSGFSSVLQFLGLYKKTGKLVFLGLDNAGKTTLLHMLKDDRLGQHVPTLHPTSEELTIAGMTFTTFDLGGHVQARRVWKNYLPAINGIVFLVDCADHERLLESKEELDSLMTDETIANVPILILGNKIDRPEAISEERLREMFGLYGQTTGKGSISLKELNARPLEVFMCSVLKRQGYGEGFRWMAQYID

SEQ ID NO: 2096 - DNA, 2555 bp, Homo sapien
cacggggctgcgtggaaagagcgccgagcggtggcgtcgttgtcgccccctcctcgtcgggaagaatcgtttggtctcctgccgtgcccggccggtgctgctgtcgctgctgctgcccgcgcgggttgtggatgttgtcggctccgtgttgtgatgacaggagaatgtgtgtgtgtcccgggcccagacgaattggaatcccagtcagaagttccagcctgccactgttctctgatgccatgccagcaccaactcaactgttttttcctctcatccgtaactgtgaactgagcaggatctatggcactgcatgttactgccaccacaaacatctctgttgttcctcatcgtacattcctcagagtcgactgagatacacacctcatccagcatatgctaccttttgcaggccaaaggagaactggtggcagtacacccaaggaaggagatatgcttccacaccacagaaattttacctcacacctccacaagtcaatagcatccttaaagctaatgaatacagtttcaaagtgccagaatttgacggcaaaatgtcagttctatccttggatttgacagcaatcaagctgcctgcaaatgcacccattgaggaccggagaagtgcagcaacctgcttgcagaccagagggatgcttttgggggtttttgatggccatgcaggttgtgcttggtcccaggcagtcagtgaaagactcttttattatattgctggctctttggtaccccatgagactttgctagagattgaaaatgcagtggagagcggccgggcactgctacccattctccagtggcacaagcaccccaatgattactttagtaaggaggcatccaaattgtactttaacagcttgaggacttactggcaagagcttatagacctcaacactggtgagtcgactgatattgatgttaaggaggctctaattaatgccttcaagaggcttgataatgacatctccttggaggcgcaagttggtgatcctaattcttttctcaactacctggtgcttcgagtggcattttctggagccactgcttgtgtggcccatgtggatggtgttgaccttcatgtggccaatactggcgatagcagagccatgctgggtgtgcaggaagaggacggctcatggtcagcagtcacgctgtctaatgaccacaatgctcaaaatgaaagagaactagaacggctgaaattggaacatccaaagagtgaggccaagagtgtcgtgaaacaggatcggctgcttggcttgctgatgccatttagggcatttggagatgtaaagttcaaatggagcattgaccttcaaaagagagtgatagaatctggcccagaccagttgaatgacaatgaatataccaagtttattcctcctaattatcacacacctccttatctcactgctgagccagaggtaacttaccaccgattaaggccacaggataagtttctggtgttggctactgatgggttgtgggagactatgcataggcaggatgtggttaggattgtgggtgagtacctaactggcatgcatcaccaacagccaatagctgttggtggctacaaggtgactctgggacagatgcatggccttttaacagaaaggagaaccaaaatgtcctcggtatttgaggatcagaacgcagcaacccatctcattcgccacgctgtgggcaacaacgagtttgggactgttgatcatgagcgcctctctaaaatgcttagtcttcctgaagagcttgctcgaatgtacagagatgacattacaatcattgtagttcagttcaattctcatgttgtaggggcgtatcaaaaccaagaaaagtgagtggctctttactggcaattctcaaatgattacatttaaagggcagattttttaaaagatctactataataaacattttcaggtggcattctaagcatttacccttttgatactctaggggcgctccaaattgactttgcagcagggtggcagggcagaagagtctggtcctgcctagctcagatttcatggcacctgcacttgaggcaagcacttctttatcacaggtgtcttgaaacattagcttcttttaccaacctgagaaaattaggatgacctggcaaataagatcttgaatagccaaaagcaagtatcttgctgtgtgtagtctcttggttaaagtgaagaacagtactgttcacacctttcttcactgagattccagtgacatgagaacatatatttattgcatgattttctagtacacagtctatgcattattcatatacatttattttagcctaaagtggttttcaaatccagttcttcaagccataaatgaccaagatccaagcaatctgaatttgtttttgtgattatttgactggaatgcttcttaagtggaataactatactccgttatccacccgatttcctaatgtaattgaaacattttctagtttgccacacacttggagaccgtaagggtttttagtttgatctactcttctattgaagttaaaaaaaaaaaaaaaaaaa

SEQ ID NO: 2097 - protein, 574 aa, Homo sapien
MLSAPCCDDRRMCVCPGPRRIGIPVRSSSLPLFSDAMPAPTQLFFPLIRNCELSRIYGTACYCHHKHLCCSSSYIPQSRLRYTPHPAYATFCRPKENWWQYTQGRRYASTPQKFYLTPPQVNSILKANEYSFKVPEFDGKMSVLSLDLTAIKLPANAPIEDRRSAATCLQTRGMLLGVFDGHAGCAWSQAVSERLFYYIAGSLVPHETLLEIENAVESGRALLPILQWHKHPNDYFSKEASKLYFNSLRTYWQELIDLNTGESTDIDVKEALINAFKRLDNDISLEAQVGDPNSFLNYLVLRVAFSGATACVAHVDGVDLHVANTGDSRAMLGVQEEDGSWSAVTLSNDHNAQNERELERLKLEHPKSEAKSVVKQDRLLGLLMPFRAFGDVKFKWSIDLQKRVIESGPDQLNDNEYTKFIPPNYHTPPYLTAEPEVTYHRLRPQDKFLVLATDGLWETMHRQDVVRIVGEYLTGMHHQQPIAVGGYKVTLGQMHGLLTERRTKMSSVFEDQNAATHLIRHAVGNNEFGTVDHERLSKMLSLPEELARMYRDDITIIVVQFNSHVVGAYQNQEK

SEQ ID NO: 2098 - DNA, 3031 bp, Homo sapien
gtggtagcggttattcggcggcccgcggcggaccatggccctggccctggcccggcgtcgctgggctttcctcacggcgtccccgagcagcgtcgcagagcgggccgacttccgggaaggaactgaccagcgactgagcggcggccggcgcgcttagcgccctgaacatgcggcagtccctgcgggcgaccccgggctccggacaggcggcggcggaggcggcggctcgggagggaaggaggcggcggcgccggcggaggtggcggcggagacggccggcgcccggcgcggagccctagggaggcagttcagcgcggcctcgggcctcgtcgagaaggatgctgtcccgaaagaaaaccaaaaacgaagtgtccaagccggccgaggtgcaggggaagtacgtgaagaaggagacgtcgcctctgcttcggaatcttatgccttcattcatccggcatggtccaacaattccaagacgaactgatatctgtcttccagattcaagccctaatgccttttcaacttctggagatgtagtttcaagaaaccagagtttccttagaactccaattcaaagaacacctcatgaaataatgagaagagaaagcaacagattatctgcaccttcttatcttgccagaagtctagcagatgtccctagagagtatggttcttctcagtcatttgtaacggaagttagttttgctgttgaaaatggagactctggttcccgatattattattcagacaatttttttgatggtcagagaaagcggccacttggagatcgtgcacatgaagactacagatattatgaatacaaccatgatctcttccaaagaatgccacagaatcaggggaggcatgcttcaggtattgggagagttgctgctacatctttaggaaatttgactaaccatggttctgaagatttaccccttcctcctggctggtctgtggactggacaatgagagggagaaaatattatatagatcataacacaaatacaactcactggagccatcctcttgagcgagaaggacttcctcctggatgggaacgagttgagtcatccgaatttggaacctattatgtagatcacacaaataagaaggcccaatacaggcatccctgtgctcctagtgtacctcggtatgatcaaccacctcctgtcacataccagccacagcaaactgaaagaaatcagtcccttctggtacctgcaaatccatatcatactgcagaaattcctgactggcttcaggtttacgcacgagcccctgtgaaatatgaccacattctgaagtgggaactcttccagctggctgacctggatacataccagggaatgctaaagttgctcttcatgaaagaattggagcagattgttaaaatgtatgaagcatacagacaagcccttcttacagagttggaaaaccgaaagcagagacagcagtggtatgcccaacaacatggaaaaaatttttgagctgattttttaaaaatttaagttttgtaagagctttaaaatattttcacagataaaaaattgcaaacaagtactctggttaataaatgctgcttcctttgtggaaattataaaattctaactttacatgtattttgttattagaaattttcttttattgaatgagaaaaattagtctatcattttaagagccaatatggcaaacactttcaaatactgtatattaggaaactgttttggtattcttgatggaaaaaaacgcagcggaaatgtcattatgaacagatgttaaataggaaattattacttgttaacttcttacagcagtagtaccttctttaaaaaaaaaaaagaatctgcggtatttttttaaaaaaaaagtttaccgctgtagtgtgaaatattgtctggaaagggatggtttaaatattaccatgatgtagttgaaatataaaataggatttggaaccttattgtgataaatatttatatatgatgtatgtttgtctcccctctccaaagtaaggaacccagctgggcgtggtggctcactcctgtaatcccagcattttgggaggccgaggtgggtggaccgcttgagtccacgagtttaagaccagcctgggcaacatggtgaagccccatctctacaaaaaatacaaaaaaattagccgggtatgatggtgtgtgcctctagtcccagctacttgggaggctgaggtcagaggatggcttgagcccaagaggcagaggttgcagggtcaagatcgcaccacttgcactgcagcctgagagagagagagccagaccttgtctcaaaaaataaaaaataaaaaaataaaaacaaaataaggaatccttttaaagcatgttgagaaagtattttttggtatgaatgggtgacgggccttttaatctttcaggaatacatataagcaggaatacttagcctgtattgggaaggtgcgtgaaactcaaagttgctaacatcatcttccttattttcagccagtgctgttactgcatttagcatggctctgacgaggcagtggagagttcctgacagcatagcatactgccttctgacagactgggttaagctaccaaaaatgacaaccagggattcaaaaaaaatttttggtcattaaatcgaatgtatattattactttttaattttctaagtatttatcacaggactttaacaccatatatttccctcccagtttttctccccttttggtttaatagttaaaacatttttcataattagtgctgtacatttgattgcaaacaaattggtgatacttctaaactataactataaatctctagaattctgtgaatttcaacattatttgaagtagttcttcagttatatttacatgtgttgtaaatatgtaaatatacttttagcttaggaagtcttccagaatacaaactactcccagttagatatcagtgagtttgaataactgaagaaatgttgacaatgttaagtgtttgattttatataacaagcttattaaatatatttttgtgg

SEQ ID NO: 2099 - protein, 383 aa, Homo sapien
MLSRKKTKNEVSKPAEVQGKYVKKETSPLLRNLMPSFIRHGPTIPRRTDICLPDSSPNAFSTSGDVVSRNQSFLRTPIQRTPHEIMRRESNRLSAPSYLARSLADVPREYGSSQSFVTEVSFAVENGDSGSRYYYSDNFFDGQRKRPLGDRAHEDYRYYEYNHDLFQRMPQNQGRHASGIGRVAATSLGNLTNHGSEDLPLPPGWSVDWTMRGRKYYIDHNTNTTHWSHPLEREGLPPGWERVESSEFGTYYVDHTNKKAQYRHPCAPSVPRYDQPPPVTYQPQQTERNQSLLVPANPYHTAEIPDWLQVYARAPVKYDHILKWELFQLADLDTYQGMLKLLFMKELEQIVKMYEAYRQALLTELENRKQRQQWYAQQHGKNF

SEQ ID NO: 2100 - DNA, 534 bp, Homo sapien
cgactttcccgatcgccaggcaggagtttctctcggtgactactatcgctgtcatgtctggtcgtggcaagcaaggaggcaaggcccgcgccaaggccaagtcgcgctcgtcccgcgctggccttcagttcccggtagggcgagtgcatcgcttgctgcgcaaaggcaactacgcggagcgagtgggggccggcgcgcccgtctacatggctgcggtcctcgagtatctgaccgccgagatcctggagctggcgggcaacgcggctcgggacaacaagaagacgcgcatcatccctcgtcacctccagctggccatccgcaacgacgaggaactgaacaagctgctgggcaaagtcaccatcgcccagggcggcgtcttgcctaacatccaggccgtactgctccctaagaagacggagagtcaccacaaggcaaagggcaagtgaggctgacgtccggcccaagtgggcccagcccggcccgcgtctcgaaggggcacctgtgaactcaaaaggctcttttcagagccaccca

SEQ ID NO: 2101 - protein, 130 aa, Homo sapien
MSGRGKQGGKARAKAKSRSSRAGLQFPVGRVHRLLRKGNYAERVGAGAPVYMAAVLEYLTAEILELAGNAARDNKKTRIIPRHLQLAIRNDEELNKLLGKVTIAQGGVLPNIQAVLLPKKTESHHKAKGK

SEQ ID NO: 2102 - DNA, 1485 bp, Homo sapien
gtgtgttctgatcttcagtgcggtagcacattctccatttagaaaagagtggtcagaataattgtggacggcacagtggctttttaaaactacagtctttaggtgtaaggtttggccgccgggagcaattttatgatcaaatatgatgaactcctaagtcactgaggtgtgattgggccaatgttggcatgaggttcttgctctacttccagtgttttgattccactgggagaatttggcctagtgtgtggctttggatgaatccgtgtagagagaggtgagcttgtcctgttacagatgctgtcagacatagcggtagtaggcacctagggaggaagtggccgttagttttacactgactttttaagaatggagaatgcacgtgggtttctgttgcggatgattcatagtaagcaagcggttgatgctgttaataccggccccacccgattgacattaagtttattcagcttttaaaaagatgaagaactaaggggaacaaatttaagtttgttgcaacttagccacacatgcttccctggtaccagctggaatcagcagctcacaggcatcttcaggacacttcagtgtatatgacacagtactttgttagcgtctgcgtgtgtatggaaagttgacaaaaaatggcatgaaaagatcatgattggattttcttttaaacctgcccttctgtaaaaaatagtttatatatttttaaattagtaggtatgtgtggcttccttttttcctaacattcccagcaaatttttgctgctaagactatcactgttaaagtgaaaattacagggaaaaatgtgatgaatataccgtaactcaaaatgtgatattttcttaaaatcactcttttatgctttaggaactgggttgggtctccactttggattattagtgttaaagggcctgagtatacgtggatttcattgtaaaatttaactccttgtcttttacttggggcacggggccctgggagggctttccctactttccccactatgttaacaggtaattctgatttatgcctttagtttgacttatttttaacaaaatattagaagttatgctttaaaatgtttaaatgtggactgaaattttcatcttttgtttgagaatctatgaagtgtatcatatacgtggcctaaagcaaggtgtgtattttgttattctgaaattgttttgcatctggacaaatactaaatatcccagtggccttttttttttttttttaaacctgtgtatccatctcatccttttgcgcattcctagtaagcaaaaaaatttgttatgccatcttcattattcgaattacagactgaaaaaatatggccagtttttaaagaagtttagattatgttttccatggaaggacaagtctgactgttcataggctgattttctttaagaggattattctgttttacaatttcaattctagatcacattttatatatgctgcatgccaaaaaa

SEQ ID NO: 2103 - protein, 102 aa, Homo sapien
MWTEIFIFCLRIYEVYHIRGLKQGVYFVILKLFCIWTNTKYPSGLFFFFLNLCIHLILLRIPSKQKNLLCHLHYSNYRLKKYGQFLKKFRLCFPWKDKSDCS

SEQ ID NO: 2104 - DNA, 4141 bp, Homo sapien
gagccggccgcggcgccctctctccgtgtggccccctgagcggcccccctcccctgcccgggagggaggcggggggcacctggggcccgccatgaaccccggcttcgatttgtcccgccggaacccgcaggaggacttcgagctgattcagcgcatcggcagcggcacctacggcgacgtctacaaggcacggaatgttaacactggtgaattagcagcaattaaagtaataaaattggaaccaggagaagactttgcagttgtgcagcaagaaattattatgatgaaagactgtaaacacccaaatattgttgcttattttggaagctatctcaggcgagataagctttggatttgcatggagttttgtggaggtggttctttacaggatatttatcacgtaactggacctctgtcagaactgcaaattgcatatgttagcagagaaacactgcagggattatattatcttcacagtaaaggaaaaatgcacagagatataaagggagctaacattctattaacggataatggtcatgtgaaattggctgattttggagtatctgcacagataacagctacaattgccaaacggaagtctttcattggcacaccatattggatggctccagaagttgcagctgttgagaggaaggggggttacaatcaactctgtgatctctgggcagtgggaatcactgccatagaacttgcagagcttcagcctcctatgtttgacttacacccaatgagagcattatttctaatgacaaaaagcaattttcagcctcctaaactaaaggataaaatgaaatggtcaaatagttttcatcactttgtgaaaatggcacttaccaaaaatccgaaaaaaagacctactgctgaaaaattattacagcatccttttgtaacacaacatttgacacggtctttggcaatcgagctgttggataaagtaaataatccagatcattccacttaccatgatttcgatgatgatgatcctgagcctcttgttgctgtaccacatagaattcactcaacaagtagaaacgtgagagaagaaaaaacacgctcagagataacctttggccaagtgaaatttgatccacccttaagaaaggagacagaaccacatcatgaacttcccgacagtgatggttttttggacagttcagaagaaatatactacactgcaagatctaatctggatctgcaactggaatatggacaaggacaccaaggtggttactttttaggtgcaaacaagagtcttctcaagtctgttgaagaagaattgcatcagcgaggacacgtcgcacatttagaagatgatgaaggagatgatgatgaatctaaacactcaactctgaaagcaaaaattccacctcctttgccaccaaagcctaagtctatcttcataccacaggaaatgcattctactgaggatgaaaatcaaggaacaatcaagagatgtcccatgtcagggagcccagcaaagccatcccaagttccacctagaccaccacctcccagattacccccacacaaacctgttgccttaggaaatggaatgagctccttccagttaaatggtgaacgagatggctcattatgtcaacaacagaatgaacatagaggcacaaacctttcaagaaaagaaaagaaagatgtaccaaagcctattagtaatggtcttcctccaacacctaaagtgcatatgggtgcatgtttttcaaaagtttttaatgggtgtcccttgaaaattcactgtgcatcatcatggataaacccagatacaagagatcagtacttgatatttggtgccgaagaagggatttataccctcaatcttaatgaacttcatgaaacatcaatggaacagctattccctcgaaggtgtacatggttgtatgtaatgaacaattgcttgctatcaatatctggtaaagcttctcagctttattcccataatttaccagggctttttgattatgcaagacaaatgcaaaagttacctgttgctattccagcacacaaactccctgacagaatactgccaaggaaattttctgtatcagcaaaaatccctgaaaccaaatggtgccagaagtgttgtgttgtaagaaatccttacacgggccataaatacctatgtggagcacttcagactagcattgttctattagaatgggttgaaccaatgcagaaatttatgttaattaagcacatagattttcctataccatgtccacttagaatgtttgaaatgctggtagttcctgaacaggagtaccctttagtttgtgttggtgtcagtagaggtagagacttcaaccaagtggttcgatttgagacggtcaatccaaattctacctcttcatggtttacagaatcagataccccacagacaaatgttactcatgtaacccaactggagagagataccatccttgtatgcttggactgttgtataaaaatagtaaatctccaaggaagattaaaatctagcaggaaattgtcatcagaactcacctttgatttccagattgaatcaatagtgtgcctacaagacagtgtgctagctttctggaaacatggaatgcaaggtagaagttttagatctaatgaggtaacacaagaaatttcagatagcacaagaattttcaggctgcttggatctgacagggtcgtggttttggaaagtaggccaactgataaccccacagcaaatagcaatttgtacatcctggcgggtcatgaaaacagttactgagaattgttgtgctttgacagttaactctagaaagaaagaacactaccactgcaacattaatggatgcttgaagctgtacaaaagctgcagtaacctgtcttcagttactttgtaatttattgtggcatgagataagatggggaaaattttgttttaagtggtatggatatatttagcatattgaaccacacaagtgcttaattcattgttatgtaatctttgtacatataggcagtattttttctgtgaaacttcatattgctgaagacatacactaagaatttatgtagataatgtacttttatgagatgtacaagtaagtgtcttatctgtacagatgtaaatgttgatgaaaatgcaattggggttaatattttaagaattctttagtatattcttgggtgtggctatattacaaaatgggatgctggcaatgaaacaatacatttaacactattgtatttttattatatgtaatttagtaatatgaatataaatcttgtaacttttaaaattgtaatggaggctgtaatcattttataatctttttaattttaatgcaagtacactggtgtttatatttgcacaaagtattgatatgtgatgtattaagtcacaaaagtaagctgtgacattgtctataagcatttggctccacaaatgtatttggattgttttctatgtgaagcaaaccaattataattaaccacatgttgtagtaactggtctttttatatttaagcagaatcctgtaagattgcttgtctttgcttaaaaacaatacctttgaacatttttgaatcacagaatagcggtaccatgatagaatactgcaattgtggtcagaattacagtatgcacaaagaattaattagcattattaaagagtcctcactaaacatttcatatgatcacactgaagaactgtaacattccatagagtgaagtggttcaaatttctcttggaatttttacttttgttggccttattttatgatccttttcatatttcttttgacttagagtattaatacatggccaaaataatttagttactacctcatacaaacaatataatggttactacacatcacaggaacttagttttggtttaagtcatttttgattgcttttttccaatggaatatgtatataccaggttttagcaaaatgcacacttttggctctttttggtatatgttctttatattttaatgtgagtatatacactaagaacaaactaaattgtgatttatgatcttcatttattttaatgataatggttttaaaatatgttcctgattgtacatattgtaaaataaacatgttttttaacaaaaaaaaaaaaaaaaaaaaaaaaaaaaa

SEQ ID NO: 2105 - protein, 894 aa, Homo sapien
MNPGFDLSRRNPQEDFELIQRIGSGTYGDVYKARNVNTGELAAIKVIKLEPGEDFAVVQQEIIMMKDCKHPNIVAYFGSYLRRDKLWICMEFCGGGSLQDIYHVTGPLSELQIAYVSRETLQGLYYLHSKGKMHRDIKGANILLTDNGHVKLADFGVSAQITATIAKRKSFIGTPYWMAPEVAAVERKGGYNQLCDLWAVGITAIELAELQPPMFDLHPMRALFLMTKSNFQPPKLKDKMKWSNSFHHFVKMALTKNPKKRPTAEKLLQHPFVTQHLTRSLAIELLDKVNNPDHSTYHDFDDDDPEPLVAVPHRIHSTSRNVREEKTRSEITFGQVKFDPPLRKETEPHHELPDSDGFLDSSEEIYYTARSNLDLQLEYGQGHQGGYFLGANKSLLKSVEEELHQRGHVAHLEDDEGDDDESKHSTLKAKIPPPLPPKPKSIFIPQEMHSTEDENQGTIKRCPMSGSPAKPSQVPPRPPPPRLPPHKPVALGNGMSSFQLNGERDGSLCQQQNEHRGTNLSRKEKKDVPKPISNGLPPTPKVHMGACFSKVFNGCPLKIHCASSWINPDTRDQYLIFGAEEGIYTLNLNELHETSMEQLFPRRCTWLYVMNNCLLSISGKASQLYSHNLPGLFDYARQMQKLPVAIPAHKLPDRILPRKFSVSAKIPETKWCQKCCVVRNPYTGHKYLCGALQTSIVLLEWVEPMQKFMLIKHIDFPIPCPLRMFEMLVVPEQEYPLVCVGVSRGRDFNQVVRFETVNPNSTSSWFTESDTPQTNVTHVTQLERDTILVCLDCCIKIVNLQGRLKSSRKLSSELTFDFQIESIVCLQDSVLAFWKHGMQGRSFRSNEVTQEISDSTRIFRLLGSDRVVVLESRPTDNPTANSNLYILAGHENSY

SEQ ID NO: 2106 - DNA, 7136 bp, Homo sapien
gcttatattttttccagctcccaaattccctttattccactttagtcccttcattttcagagatgaggaaacagattgctttgttcaaagacagctagaactagaacacaggctaatacttgctagccatgtgatatactaatgtcagccaaatacgggcatttacactttcagatgtttgccatatctgtgcacttactaattctgtttaatacaatttaaattgactcctttaaataagcttattttaaaggaaattttttgctactataaatagaaaaccattatatcctttaaatagtaactctaaataggaattcaaaacaaagcaacgttattaaaatttaatttaaaattaatttaaatttaattgttattaaatttttaattattgctgttcttcgtcagaaatgtgtcaaagcattgttttcatgtttgatgtcagttccttaattgtctaaacagaaaaagcacagctaatgcctctagttaagcttctgtataacttttttaaatgaaatgcttcttagaggggaaatgagagggcatgaatacatgtttatatactaaagtatgatttcatgtatatcagaagatcttattatatggaaccaaaattattctttggttgatttaattgttcttgaaacttcagtttttaccttgaaggttttagttagcttagcataagtttatttttctaaataaggaatctgattgcctcacaactcagatgtatcacagttatggtgaaatagcaatatattggtttctgtaaccttttaaataccgtaatgaattaaaatctcttcagcaaaagcaaatatatctagggtgacgagaggtgtttttagtgtatttgaatgatggaaatgtttttcttaaaatatttctgaagcattttttaaaataattttttgaatttattgatgatagtagttgtgtgttagtgtgaatgactggtctaaatgtgtatgtcacttccaagggattagtaggggtcagaatgatttgttttattcattgacttttcctttgacgtgttcttattcattgggctacatacattccctgttgccttctcaccaaaagtgccactacacaggctgtatttcattgtactgtagaaaaagacaagtagacctttttcattcatgagattcctatgaaatctgttggtggaggtataaaatgaggagacttttatgggctagctagtaggagttttgctgtgaaacctttgtaacaggtctatcaggaactagggagagaaataaatgcaggaaatacttgatcccattaaactgaggatgaaaaagacatgataatattttggggattatttattgtgtgattttccggctgatcagaagtgttaattttttgttatacttgtgtcaaatacatatatatatatatattttgaaatggagtcttgctctgtcacccaggctggagtgcagtggtgcgatctgggttcactgcaacctctgcctccaggttcaagtgatcctcctgcctcagcctcccgagtagctaggactacaggcacgtgccaccacgccctgctaatttttgtattcttagtggagatggggtttcaccatgttggccaggctggtcttgaactcctgacctcaagtgatcttcccaccttggcctttctgaactatttcctttacacacatttagaactacatctaactgtattatagttttcactttcaccatcagacaaaattcagaagattcaagagaaggaaagtcgattgtatttactcatatttttgctaccgtgtttttacatctcatattttaaggctctcttaattatttattttctgtttagttaatttcctctagccattctttatttatagtgggtctgctggtaacaaattctctcaatttttcctcgtctgagaatgtcttgacttcccttccatttttgtcagcacctgaaaaatactatgccactatcttctgggttctgtggtttctgatgagaactccactgtcagtctaattgtcgttataaatgcagtgttctctctctctctctgcttccaggatattttttcttttttttttttttttttttcttgagacggagtctcactctgtcgcccaggctggagtgcagtggcgcaattttggctcactgcaagctctgcctcccgggttcaagcgattactcccactttagcctcccaagtagctaggactacaaggcacaccaccatgcctggctaatttttgtatttttagtagagacggggtttcaccatgttgcccaggctggtctcgaactcctgacatcaagtgatcttcctgcctccgcttcccaaagtgctggaattacaggcgtgagccactgctcccagcctctttattttttcagctttactctttcttctgtctttttgacatgtgtgtccagtgacacacgtgttagattttgctatagtctcacgcacgggtctataaggctctgttttttgtttcattttgtttttcctattttctctctattcagatcgagtaatttccactgttcagttttatcatagctgcttttaaatctttgtcaggtaattctgtcatctaagttttggcacctattgattatcttttgcattgtttttgtttttgtttctgtttttgttttgagatggagtcttgctctgttgcccaggttggagtgcagtggcactgatctcggctcactgcaacctcctcctcccgggttcaagtggttctcctgcctcaacctccttagtagctgggattacaggcatgtgccaccacgcccggctaattttgtatttttagtagagaccaggtttatccatgttggtcaggctggtctcaaactcccaacctcaagtgatccgcctgcctcgacctcccaaagtgctgggattacaggcgtgaaccactgcacccagcctatcttttgcattgttttaaatcttgttcttgctaggatgaatgattttctgttaaaactagatattttcatattatgttcctaggctctggatattatctaaaccttctgtttccactggcttttattgacactgctttggcaaggtcatagggggtgcctcattactgccaggtggacatagaagtcaagggtccctactcagcctctactgatgcctcaggaagaggatccttcttgttattgctgggtgggggtggaagtctagctgacacctactgaggtaggtgctggggcatgcccggccatcagggtgaaagtcctggctccctagttggcctacttttacattgccctaatagggcattggagctcctcactatggtttatgagctggaagtcaaggctcctcacttagctttcgttggtgtgggtggtggtggggcaaaactgttttctgggtttggctggagtggagcagttactgtcaaaagttttctgtcttgccaggctgtccctttcttgtttctttggctagagagagcaagcttttgttgtggctctttttgtctgtgccagttggcatttccaggttgctgccttctttagctccaagtctgggatatattaggcaaaaagaaaacccagagaatttacaccaccgtgtcattccatgggtcctgaggtcccttacttagtctgccttctctccacttttcacagtcttctcatgttttgtatataatgtccagggtctttagttatacttagcagaaataaaagggaaaagtatgtctgctctatgcttctgtaagtggaagtcttcaaatttgcatttttgattcctttaaacagttttgtaaaatatataatcattattgggcaaaatgtcccataaaatgtatataccttgtgatggtttgcataatattgtgttcaagaggactgctgaaaaataacatctttatttaaactgaaacgaattgttcacattattaatgaaaacttttcccctctaggaaataatgcaaaaggtgtcccaaggctcctgaccagtgaacaaagatttgagaaagacagccaagctcatgttttctcctgatcaagaaaatcatccatctaaagcaccagtaaaatatggtgaactcattgtcttaggctataatgggtctctcccaaatggcgatagaggaaggaggaaaagtaggtttgctttgtttaaaagacctaaggcaaatggggtgaagcccagcactgtgcatattgcttgtactcctcaggctgcaaaggcaataagcaacaaagaccagcatagcatatcatatactttgtctcgggcccagactgtggtggttgaatatactcatgacagcaacacagatatgtttcagattggccggtcgactgaaagccccattgattttgtagtaactgacacggttcctggaagtcaaagtaattctgatacacagtcagtacaaagcactatatcaagatttgcctgcagaatcatatgtgaacggaatcctccctttacagcacggatttatgctgcaggatttgactcatcaaaaaacatctttcttggggagaaggctgccaaatggaagacatcagatggacagatggatggcttgaccactaatggtgttcttgtgatgcatccacgcaatgggttcacagaagactccaagcctggaatatggagagaaatatcggtgtgtggaaatgtatttagcctacgtgaaaccagatcggctcagcagagaggaaaaatggtggaaattgaaaccaatcagttacaagatggctcgttaattgacctctgtggtgcaacattgttatggcgtactgcagaaggcctttcccacactcctaccgtgaagcatttagaagctttaagacaggaaatcaatgcagcacgacctcagtgccctgtagggttcaacacactagcatttcctagtatgaagaggaaagacgttgtagatgaaaaacaaccatgggtatatctaaactgcggccatgtacatggctatcataactggggaaacaaagaagaacgtgatggaaaagatcgtgaatgtcctatgtgtaggtctgttggtccctatgttcctctgtggcttggatgtgaagctggattttatgtggacgccggccctccaacccatgcgtttagcccgtgtgggcatgtgtgttcagaaaagacaactgcctattggtcccagatcccacttcctcatggtactcatacttttcatgcagcctgtcccttttgtgcacatcagttggctggtgaacaaggctacatcagacttatttttcaaggacctctagactaacagaccattgtcttgcaggactacattataaatttataagctaagtgagttgggttttcgaacctgttgtccacgtcacagtttttctgctctggtcatttgcattaagatgaagaattttttaaaacatttataataaatagtagcaatttctgagcaaaaatctgggaaactcaagcaaaggaatttctgaaagtatcagtcttctgaattctgagttttgaaaatatattttgaggagaaaaagacatagtctaatttgatgccttccttttagtgtttttgaatcacctatcctcagtgctgaaattgttttgtataactgagggtactgttggttcaaactatgttagtttacagtttgttgcaaacattgtaaaatacagcgacatgtatattaacttttttctatttatctttattatagaaaataccttagaatgttcttgatagagtagcatggtaacgatggtgtcacacccttggtgtgaatggtagcttagtgagcaacctagctcaaggatttgcaaagttaggaagaaggacgagagagcctctctccccaccccaatctaaatatggaatttggtaaattagaatactttgtaatttgtaagaccaaattcatactaattacccgcgtgaaaggtgtttgtttttaacaacattgaagataatcaggaaagattttttcttaatgtttctctcgagcgtagtactataacaaaaacttaatgctaagaaacattttatatgctcctttggatatgcaatttaatctagattatctatttttctcccatgataactaatctgtttttagtatcagcagcatttggcaagtttattttttggatataaactgtggttcatctgttcactgtttctagaaaaaaatcattgccataagaaaaagtataaattagcaagaaaggagagtgacttgatttgcttttggaaaaagaaatgcttaattaattattctgtatttggccttattcgggcattaggaaatctagagatctaaagggttgaatgacaatagtgcccccgtttttagcagaccagccttaactctgggtttgaatcctaaggagattgccacagtgagacttaaggaaatgtttggttggcagatgagcaccaatgactgcagcgtggagtgacgcactgcatggtctgtttattctctaattccaatatgtcttttgcttccagaagcaagaaaagtttcttctctcccctccttcccacccttttttcaaaggcaccacaagtatagacagttgcactacatcaaatctttttttgacacttgtagaaaccagtacacttttagattagacagtatcttcttttaatattttgatttgttttcctttagtttgaaaagttgtataatacttaactgactgtagcaaagttttatatgtggtagcatacctttaatttatcctattacaaaactgttctgaattttcttttggtttttaaaaaacaaaacttgttgcttagaagccatgaattattttattttacttcaactgtcgaaacttccttgttttaaaaaatgatcatttgggttcactcaggaaatgcatgtcaggaaacttgtattataagtttattagttgtgatgtatcagtaactgctgttacccctttttcaaagaaatgtaattgattttgaagttttctagattgtcacatgctttgtgactaatgcaagaaagcaagtcctgtgttgtatttgttctagtcatttttattcaggctatatattgtagcttaatttttatttgcaattaatttatttaaactaagtaaatacttttcaaaata

SEQ ID NO: 2107 - protein, 418 aa, Homo sapien
MFSPDQENHPSKAPVKYGELIVLGYNGSLPNGDRGRRKSRFALFKRPKANGVKPSTVHIACTPQAAKAISNKDQHSISYTLSRAQTVVVEYTHDSNTDMFQIGRSTESPIDFVVTDTVPGSQSNSDTQSVQSTISRFACRIICERNPPFTARIYAAGFDSSKNIFLGEKAAKWKTSDGQMDGLTTNGVLVMHPRNGFTEDSKPGIWREISVCGNVFSLRETRSAQQRGKMVEIETNQLQDGSLIDLCGATLLWRTAEGLSHTPTVKHLEALRQEINAARPQCPVGFNTLAFPSMKRKDVVDEKQPWVYLNCGHVHGYHNWGNKEERDGKDRECPMCRSVGPYVPLWLGCEAGFYVDAGPPTHAFSPCGHVCSEKTTAYWSQIPLPHGTHTFHAACPFCAHQLAGEQGYIRLIFQGPLD

SEQ ID NO: 2108 - DNA, 1224 bp, Homo sapien
gttcggagcgggcgagcggagttagcagggctttactgcagagcgcgccgggcactccagcgaccgtggggatcagcgtaggtgagctgtggccttttgcgaggtgctgcagccatagctacgtgcgttcgctacgaggattgagcgtctccacccagtaagtgggcaagaggcggcaggaagtgggtacgcaggggcgcaaggcgcacagcctctagacgactcgctttccctccggccaacctctgaagccgcgtcctactttgacagctgcagggccgcggcctggtcttctgtgcttcaccatctacataatgaatcccagtatgaagcagaaacaagaagaaatcaaagagaatataaagaatagttctgtcccaagaagaactctgaagatgattcagccttctgcatctggatctcttgttggaagagaaaatgagctgtccgcaggcttgtccaaaaggaaacatcggaatgaccacttaacatctacaacttccagccctggggttattgtcccagaatctagtgaaaataaaaatcttggaggagtcacccaggagtcatttgatcttatgattaaagaaaatccatcctctcagtattggaaggaagtggcagaaaaacggagaaaggcgctgtatgaagcacttaaggaaaatgagaaacttcataaagaaattgaacaaaaggacaatgaaattgcccgcctgaaaaaggagaataaagaactggcagaagtagcagaacatgtacagtatatggcagagctaatagagagactgaatggtgaacctctggataattttgaatcactggataatcaggaatttgattctgaagaagaaactgttgaggattctctagtggaagactcagaaattggcacgtgtgctgaaggaactgtatcttcctctacggatgcaaagccatgtatatgaaatgcattaatatttgactgttgagaattttactgccgaagtttacctccactagttctttgtagcagagtacataactacataatgccaactctggaatcaaatttccttgtttgaatcctgggaccctattgcattaaagtacaaatactatgtatttttaatctatgatggtttatgtgaataggattttctcagttgtcagccatgacttatgtttattactaaataaacttcaaactcctgtggaaaaaaaaaaaaaaaaaaaaaaaaaaaaaaa

SEQ ID NO: 2109 - protein, 209 aa, Homo sapien
MNPSMKQKQEEIKENIKNSSVPRRTLKMIQPSASGSLVGRENELSAGLSKRKHRNDHLTSTTSSPGVIVPESSENKNLGGVTQESFDLMIKENPSSQYWKEVAEKRRKALYEALKENEKLHKEIEQKDNEIARLKKENKELAEVAEHVQYMAELIERLNGEPLDNFESLDNQEFDSEEETVEDSLVEDSEIGTCAEGTVSSSTDAKPCI

SEQ ID NO: 2110 - DNA, 1718 bp, Homo sapien
  Unsure 1442: Unknown base
gcggacgcgtgggcggacgcgtggggaaagttacgaggttcgtggccgcggtttccccaggcagctggcgctggaggcttcggcgtcacgtgctggtctggatttttctcgatgcactggggaaagcggtggactcttatcgtgggagggctcttgatctgtgatttatagataggcacagctactcccgttcgggaacccaacggcagacaggtcctagtgcccatcagatacccgcggccgggactcggagctgtggggtgtggggaggcggaggcaccaactaagagcgacctagcatcgcaaagccgccctcggggcgctcatggcgggacgcctcctgggaaaggctttagccgcggtgtctctctctctggccttggcctctgtgactatcaggtcctcgcgctgccgcggcatccaggcgttcagaaactcgttttcatcttcttggtttcatcttaataccaacgtcatgtctggttctaatggttccaaagaaaattctcacaataaggctcggacgtctccttacccaggttcaaaagttgaacgaagccaggttcctaatgagaaagtgggctggcttgttgagtggcaagactataagcctgtggaatacactgcagtctctgtcttggctggacccaggtgggcagatcctcagatcagtgaaagtaatttttctcccaagtttaacgaaaaggatgggcatgttgagagaaagagcaagaatggcctgtatgagattgaaaatggaagaccgagaaatcctgcaggacggactggactggtgggccgggggcttttggggcgatggggcccaaatcacgctgcagatcccattataaccagatggaaaagggatagcagtggaaataaaatcatgcatcctgtttctgggaagcatatcttacaatttgttgcaataaaaaggaaagactgtggagaatgggcaatcccaggggggatggtggatccaggagagaagattagtgccacactgaaaagagaatttggtgaggaagctctcaactccttacagaaaaccagtgctgagaagagagaaatagaggaaaagttgcacaaactcttcagccaagaccacctagtgatatataagggatatgttgatgatcctcgaaacactgataatgcatggatggagacagaagctgtgaactaccatgacgaaacaggtgagataatggataatcttatgctagaagctggagatgatgctggaaaagtgaaatgggtggacatcaatgataaactgaagctttatgccagtcactctcaattcatcaaacttgtggctgagaaacgagatgcacactggagcgaggactctgaagctgactgccatgcgttgtagctgatggtctccgtgtaagccaaaggcccacagaggagcatatactgaaaagaaggcagtatcncagaatttatactataaaaagggcagggtaggccacttggcctatttactttcaaaacaatttgcatttagagtgtttcgcatcagaataacatgagtaagatgaactggaacacaaaattttcagctctttggtcaaaaggaatataagtaatcatattttgtatgtattcgatttaagcatggcttaaattaaatttaaacaactaatgctctttgaagaatcataatcagaataaagataaattcttgatcagctataaaaaaaaaaaaaaaa

SEQ ID NO: 2111 - protein, 350 aa, Homo sapien
MAGRLLGKALAAVSLSLALASVTIRSSRCRGIQAFRNSFSSSWFHLNTNVMSGSNGSKENSHNKARTSPYPGSKVERSQVPNEKVGWLVEWQDYKPVEYTAVSVLAGPRWADPQISESNFSPKFNEKDGHVERKSKNGLYEIENGRPRNPAGRTGLVGRGLLGRWGPNHAADPIITRWKRDSSGNKIMHPVSGKHILQFVAIKRKDCGEWAIPGGMVDPGEKISATLKREFGEEALNSLQKTSAEKREIEEKLHKLFSQDHLVIYKGYVDDPRNTDNAWMETEAVNYHDETGEIMDNLMLEAGDDAGKVKWVDINDKLKLYASHSQFIKLVAEKRDAHWSEDSEADCHAL

SEQ ID NO: 2112 - DNA, 1561 bp, Homo sapien
ggctgacccacctacccgcgatcctgcccatggctgacgggctctttcggcgcagaccctggggtctcgagcagattcgcccggaccccgagtccgaaggcctgtttgacaagcctcccccggaagaccctcccgctgcccgcgggcccaggtcggcgtcggccgcgggcaagaaggctggtcggcgcgcgggcgggagggcgcaggggggccgcgccgggcagcccccgaaggccgcatcgcaccccccgcccaagaaggaggcgcctccactggacgagggctgctatctcgaccattttccgcacctctccatcttcatctacgcagccatcgccttctccatcacctcctgcatctttacctatatccatttacagcttgcctgagtggccagcgcgggacggggtgggcgcaggaccgagcggggagggaaagggaaaacggggctcggcattttgtgttttagaacagcgctgcacccccttcatgtagctttcgatgcttgtttctttccgtctttgttgtcactatctttgtctatcagtacgaaagtacaaagtagctgccggcaatgaaataggggtgctgtttgcacctgcaggttaggggtggaggcgtttagaattttggggtgtgattgagccccgtttataattagaatgcccctggacccctaccactctgtgacgtgggggcacgcgcagggatcccatcattttgtgtttggggagctcagagtgcgcccaatcttggaatctttaagggatgagccagacccagacccgcggccttctagagagggtccggcagggagggtcggcgccctggcccgggatgggccggagccctgtgatgctgcatcgcccccaggaggagccagctgtgccccagagttggcgcggccgagagaggacaagagcgcgcagcaggcgaagctggagggcgggactcgactttgttgtcgctgcccggaggagtcgagactggtacccggaggagctgtctcaccaggagaccacgtcctggaagtgtccgggactcgcgggacctgtggctgcagaccccgccggcacgcaggcccagagctggcgcactcctgaggatgagactctgggggccctagccggggtccacgggagggctgtccttggggactctaggatggcttcgttctggcccggctcacttctggagctgtgagacccaagacaaaaggggctgagggatttctcattgacaagagttcgtgcgggaaaaccacctgacccctagggatttgtcatcttaagactcaaaaggcttaataccaggaaccaccttggcaagatatttacccaccggccatctctgtttactcatgaatgttaaatgttaaaacgcagcgctctaaccctgcatattatttacttgcaaatgtctgtaatctgtaattgtgatgcctctgatggaataaattatctttttcagtctcctctaaaaaaaaaaaaaaaaaaaaaaaaaaaaaaaaaaaaaaaaaaaaaaaaaaaaaaaaaaaaaaaaaaaaaaaaaaaaaaaaaaa

SEQ ID NO: 2113 - protein, 146 aa, Homo sapien [sequence omitted]

SEQ ID NO: 2114 - DNA, 953 bp, Homo sapien
ggcacgaggctcaccatggtgggccccgcgccgcggcggcggctgcggccgctggcagcgctggccctggtcctggcgctggccccggggctgcccacagcccgggccgggcagacaccgcgccctgccgagcgggggcccccagtgcggcttttcaccgaggaggagctggcccgctatggcggggaggaggaagatcagcccatctacttggcagtgaagggagtggtgtttgatgtcacctccggaaaggagttttatggacgaggagccccctacaatgccttgacggggaaggactccactagaggggtagccaagatgtccttggatcctgcagacctcacccatgacactacgggtctcacggccaaggaactggaggccctggatgaggtcttcaccaaagtgtacaaagccaaataccccatcgtcggctacactgcccggagaattctcaatgaggatggcagccctaacctggacttcaagcctgaagaccagccccattttgacatcaaggatgagttctgatgttccccctgcaggagcaggttcttgggagcgtgaggcaggaagacactaggtgctgaatctcctgcaaaactggctgcctggaggccctgagccacccagatctgaataaaacagatgcttaccctggaagagcaaatgcctcctgttgtctttggtcaggggttctgtctacctggggacccctgtctgcacaccagggatcaataagagccaaagtgggacacctcctagatgtcagtatcagctggctgggcagtggaattttgagcgacctttactttatacttttctgtgcttgacagattttcagccatgaccatgttcactttataatcaaaacaaaaataaaggtcccatttttacaaaaggaaaaaaaaaaaaaaaaaaaaaaaaaaaaaaaaaaaaaaaaaaaaaaa

SEQ ID NO: 2115 - protein, 172 aa, Homo sapien
MVGPAPRRRLRPLAALALVLALAPGLPTARAGQTPRPAERGPPVRLFTEEELARYGGEEEDQPIYLAVKGVVFDVTSGKEFYGRGAPYNALTGKDSTRGVAKMSLDPADLTHDTTGLTAKELEALDEVFTKVYKAKYPIVGYTARRILNEDGSPNLDFKPEDQPHFDIKDEF

SEQ ID NO: 2116 - DNA, 3446 bp, Homo sapien
taaatggcagccaatggagggtggtgttgcgcggggctgggattagggccggggcgaatggctggcaatcttactgggattacagaacaaagagcctccccgcgctcccgctctccgctcctctccccgcgccgccccgccctccgccgcagcccgcgccgggggtgggggccgccgagcgccagccccccggccggccgattccccccccgcgccccctccccgcgcctccctccccgccctcgccgcgccgccgtcctcgcctccctctgcctctccttcccccattctcccggattaattaaggaggcagcggcaggaggctgagtcctggccgcgggccggggccggggcgccgctggcaggagcgcttggggatcctccaaggcgaccatggccttgctgggtaagcgctgtgacgtccccaccaacggctgcggacccgaccgctggaactccgcgttcacccgcaaagacgagatcatcaccagcctcgtgtctgccttagactccatgtgctcagcgctgtccaaactgaacgccgaggtggcctgtgtcgccgtgcacgatgagagcgcctttgtggtgggcacagagaaggggagaatgttcctgaatgcccggaaggagctacagtcagacttcctcaggttctgccgagggcccccgtggaaggatccggaggcagagcaccccaagaaggtgcagcggggcgagggtggaggccgtagcctccctcggtcctccctggaacatggctcagatgtgtaccttctgcggaagatggtagaggaggtgtttgatgttctttatagcgaggccctgggaagggccagtgtggtgccactgccctatgagaggctgctcagggagccagggctgctggccgtgcaggggctgcccgaaggcctggccttccgaaggccagccgagtatgaccccaaggccctcatggccatcctggaacacagccaccgcatccgcttcaagctcaagaggccacttgaggatggcgggcgggactcgaaggccctggtggagctgaacggtgtctccctgattcccaaggggtcacgggactgtggcctgcatggccaggcccccaaggtgccaccccaggacctgcccccaaccgccacctcctcctccatggccagcttcctgtacagcacggcgctccccaaccacgccatccgagagctcaagcaggaagcaccttcctgcccccttgcccccagcgacctgggcctgagtcggcccatgccagagcccaaggccaccggtgcccaagacttctccgactgttgtggacagaagcccactgggcctggtgggcctctcatccagaacgtccatgcctccaagcgcattctcttctccatcgtccatgacaagtcagagaagtgggacgccttcataaaggaaaccgaggacatcaacacgctccgggagtgtgtgcagatcctgtttaacagcagatatgcggaagccctgggcctggaccacatggtccccgtgccctaccggaagattgcctgtgacccggaggctgtggagatcgtgggcatcccggacaagatccccttcaagcgcccctgcacttatggagtccccaagctgaagcggatcctggaggagcgccatagtatccacttcatcattaagaggatgtttgatgagcgaattttcacagggaacaagtttaccaaagacaccacgaagctggagccagccagcccgccagaggacacctctgcagaggtctctagggccaccgtccttgaccttgctgggaatgctcggtcagacaagggcagcatgtctgaagactgtgggccaggaacctccggggagctgggcgggctgaggccgatcaaaattgagccagaggatctggacatcattcaggtcaccgtcccagacccctcgccaacctctgaggaaatgacagactcgatgcctgggcacctgccatcggaggattctggttatgggatggagatgctgacagacaaaggtctgagtgaggacgcgcggccggaggagaggcccgtggaggacagccacggtgacgtgatccggcccctgcggaagcaggtggagctgctcttcaacacacgatacgccaaggccattggcatctcggagcccgtcaaggtgccgtactccaagtttctgatgcacccggaggagctgtttgtggtgggactgcctgaaggcatctccctccgcaggcccaactgcttcgggatcgccaagctccggaagattctggaggccagcaacagcatccagtttgtcatcaagaggcccgagctgctcactgagggagtcaaagagcccatcatggatagtcaaggaactgcctcctcacttggcttctctccccctgccctgcccccagagagggattccggggaccctctggtggacgagagcctgaagagacagggctttcaagaaaattatgacgcgaggctctcacggatcgacatcgccaacacactaagggagcaggtccaggaccttttcaataagaaatacggggaagccttgggcatcaagtacccggtccaggtcccctacaagcggatcaagagtaaccccggctccgtgatcatcgaggggctgcccccaggaatcccgttccgaaagccctgtaccttcggctcccagaacctggagaggattcttgctgtggctgacaagatcaagttcacagtcaccaggcctttccaaggactcatcccaaagcctgatgaagatgacgccaacagactcggggagaaggtgatcctgcgggagcaggtgaaggaactcttcaacgagaaatacggtgaggccctgggcctgaaccggccggtgctggtcccttataaactaatccgggacagcccagacgccgtggaggtcacgggtctgcctgatgacatccccttccggaaccccaacacgtacgacatccaccggctggagaagatcctgaaggcccgagagcatgtccgcatggtcatcattaaccagctccaaccctttgcagaaatctgcaatgatgccaaggtgccagccaaagacagcagcattcccaagcgcaagagaaagcgggtctcggaaggaaattccgtctcctcttcctcctcgtcttcctcttcctcgtcctctaacccggattcagtggcatcggccaaccagatctcactcgtgcaatggccaatgtacatggtggactatgccggcctgaacgtgcagctcccgggacctcttaattactagacctcagtactgaatcaggacctcactcagaaagactaaaggaaatgtaatttatgtacaaaatgtatattcggatatgtatcgatgccttttagtttttccaatgatttttacactatattcctgccaccaaggcctttttaaataagtaaaaaaaaaaaaaaaaaaaaaaa

SEQ ID NO: 2117 - protein, 959 aa, Homo sapien
MALLGKRCDVPTNGCGPDRWNSAFTRKDEIITSLVSALDSMCSALSKLNAEVACVAVHDESAFVVGTEKGRMFLNARKELQSDFLRFCRGPPWKDPEAEHPKKVQRGEGGGRSLPRSSLEHGSDVYLLRKMVEEVFDVLYSEALGRASVVPLPYERLLREPGLLAVQGLPEGLAFRRPAEYDPKALMAILEHSHRIRFKLKRPLEDGGRDSKALVELNGVSLIPKGSRDCGLHGQAPKVPPQDLPPTATSSSMASFLYSTALPNHAIRELKQEAPSCPLAPSDLGLSRPMPEPKATGAQDFSDCCGQKPTGPGGPLIQNVHASKRILFSIVHDKSEKWDAFIKETEDINTLRECVQILFNSRYAEALGLDHMVPVPYRKIACDPEAVEIVGIPDKIPFKRPCTYGVPKLKRILEERHSIHFIIKRMFDERIFTGNKFTKDTTKLEPASPPEDTSAEVSRATVLDLAGNARSDKGSMSEDCGPGTSGELGGLRPIKIEPEDLDIIQVTVPDPSPTSEEMTDSMPGHLPSEDSGYGMEMLTDKGLSEDARPEERPVEDSHGDVIRPLRKQVELLFNTRYAKAIGISEPVKVPYSKFLMHPEELFVVGLPEGISLRRPNCFGIAKLRKILEASNSIQFVIKRPELLTEGVKEPIMDSQGTASSLGFSPPALPPERDSGDPLVDESLKRQGFQENYDARLSRIDIANTLREQVQDLFNKKYGEALGIKYPVQVPYKRIKSNPGSVIIEGLPPGIPFRKPCTFGSQNLERILAVADKIKFTVTRPFQGLIPKPDEDDANRLGEKVILREQVKELFNEKYGEALGLNRPVLVPYKLIRDSPDAVEVTGLPDDIPFRNPNTYDIHRLEKILKAREHVRMVIINQLQPFAEICNDAKVPAKDSSIPKRKRKRVSEGNSVSSSSSSSSSSSSNPDSVASANQISLVQWPMYMVDYAGLNVQLPGPLNY

SEQ ID NO: 2118 - DNA, 3912 bp, Homo sapien
accgccttcgccgcggaccttcagctgccgcggtcgctccgagcggcgggccgcagaggttcaagcgattctcctgcttcagcctccggagtagctgggattacaggcacgtgccaacacacccagccaccaaaatgccagaagagatggacaagccactgatcagcctccacctggtggacagcgatagtagccttgccaaggtccccgatgaggcccccaaagtgggcatcctgggtagcggggactttgcccgctccctggccacacgcctggtgggctctggcttcaaagtggtggtggggagccgcaaccccaaacgcacagccaggctgtatccctcagcggcccaagtgactttccaagaggaggcagtgagctccccggaggtcatctttgtggctgtgttccgggagcactactcttcactgtgcagtctcagtgaccagctggcgggcaagatcctggtggatgtgagcaaccctacagagcaagagcaccttcagcatcgtgagtccaatgctgagtacctggcctccctcttccccacttgcacagtggtcaaggccttcaatgtcatctctgcctggaccctgcaggctggcccaagggatggtaacaggcaggtgcccatctgcggtgaccagccagaagccaagcgtgctgtctcggagatggcgctcgccatgggcttcatgcccgtggacatgggatccctggcgtcagcctgggaggtggaggccatgcccctgcgcctcctcccggcctggaaggtgcccaccctgctggccctggggctcttcgtctgcttctatgcctacaacttcgtccgggacgttctgcagccctatgtgcaggaaagccagaacaagttcttcaagctgcccgtgtccgtggtcaacaccacactgccgtgcgtggcctacgtgctgctgtcactcgtgtacttgcccggcgtgctggcggctgccctgcagctgcggcgcggcaccaagtaccagcgcttccccgactggctggaccactggctacagcaccgcaagcagatcgggctgctcagcttcttctgcgccgccctgcacgccctctacagcttctgcttgccgctgcgccgcgcccaccgctacgacctggtcaacctggcagtcaagcaggtcttggccaacaagagccacctctgggtggaggaggaggtctggcggatggagatctacctctccctgggagtgctggccctcggcacgttgtccctgctggccgtgacctcactgccgtccattgcaaactcgctcaactggagggagttcagcttcgttcagtcctcactgggctttgtggccctcgtgctgagcacactgcacacgctcacctacggctggacccgcgccttcgaggagagccgctacaagttctacctgcctcccaccttcacgctcacgctgctggtgccctgcgtcgtcatcctggccaaagccctgtttctcctgccctgcatcagccgcagactcgccaggatccggagaggctgggagagggagagcaccatcaagttcacgctgcccacagaccacgccctggccgagaagacgagccacgtatgaggtgcctgccctgggctctggaccccgggcacacgagggacggtgccctgagcccgttaggttttcttttcttggtggtgcaaagtggtataactgtgtgcaaataggaggtttgaggtccaaattcctgggactcaaatgtatgcagtactattcagaatgatatacacacatatgtgtatatgtatttacatatattccacatatataacaggatttgcaattatacatagctagctaaaaagttgggtctctgagatttcaacttgtagatttaaaaacaagtgccgtacgttaagagaagagcagatcatgctattgtgacatttgcagagatatacacacactttttgtacagaagaggcttgtgctgtggtgggttcgatttatccctgcccaccccatccccacaacttcccttttgctacttccccaaggctcttgcagagctagggctctgaaggggagggaaggcaacggctctgcccagagccatccctggagcatgtgagcagcggctggtctcttccctccacctggggcagcagcaggaggcctgggggggaggaaaatcaggcagtcggcctggagtctgtgcctggtcctttgcccggtggtgggaggatggagggattgggctgaagctgctccacctcatccttgctgagtgggggagacattttccctgaaagtcagaagtcaccatagagcctgcaaatggatcctcctgtgagagtgacgtcacctcctttccagagccattagtgagcctggcttgggaacaagtgtaatttccttccctcctttaacctggcgatgagcgtcctttaaaccactgtgccttctcaccctttccatcttcagtttgaacgactcccaggaaggcctagagcagaccctttagaaatcagcccaagggggagagcaagagaaaacactctagggagtaaagctccccgggcgtcagagttgagccctgcctgggctgaaggactgtcttcacgaagtcagtcctgaggaaaaatattggggactccaaatgtcctctggcagaggacccagaaaaccacactggctccaacttcctcctcatggggcattacacttcaaaacagtggggagcaacttttccaccaaagctacaaacctaaaatgctgctgccccaaagcacaagagggaagagcaccgccggggccacaggacgtctgtcctccagtcacaggccatccttgctgctccctactgactctagcttacttcccctgtgaagaaacaggtgttctcggctgagcccccaaccctctgcagaaccaggttgatctgccacagaaaaagcatctttgaagacaaagagggtgaggtcttcatgagtctcctgggcccaaagccatcttctgatggaaggaagagagtagggccagtgaaggctgcccagagagaatgtcacagatgaggctgcccctgccccctccccgccagggaggtttcatgagctcatgtctatgcagcacataagggttcttcagtgaaaagcaggagaagagcccactgcaaggatagctcattaggcacatgaccgatgcagggaaggccatgccggggaagctcttcctgcaggtattttccatctgctgtgccaaggctgagcggcagaaacttgtctcataaattggcactgatggagcatcagctgtggcccacagagagccttgctgagaagggggcaggtaaagcagagattttagcattgccttggcataacaagggcccatcgattccctactaatgagaggcagggagagcatgggcaatggagacccaccaatgatccccaaccccggtgggtactggctgcctgccctgggccagggaatggctccttataccaaagatgctggcacatagcagaacccagtgcacgtcctccccttcccacccacctctggctgaaggtgctcaagagggaagcaattataaggtgggtggcaggagggaacaggtgccacctgctggacaatcacacgaaaggcaggcgggctgtgtactgggccctgactgtgcgtccactgctgtcttccctacctcaccaggctactggcagcagcatcccgagagcacatcatctccacagcctggtaaattccatgtgcctctgggtacaaaagtgcctcaacgacatgctctggaaatcccaaatgccacagtctgaggttgatatctaaaatctatgccttcaaaagagtctctgttttttttttttaacctggtagacggtataaaagcagtgcaaataaacacctaaccttctgc

SEQ ID NO: 2119 - protein, 488 aa, Homo sapien
MPEEMDKPLISLHLVDSDSSLAKVPDEAPKVGILGSGDFARSLATRLVGSGFKVVVGSRNPKRTARLYPSAAQVTFQEEAVSSPEVIFVAVFREHYSSLCSLSDQLAGKILVDVSNPTEQEHLQHRESNAEYLASLFPTCTVVKAFNVISAWTLQAGPRDGNRQVPICGDQPEAKRAVSEMALAMGFMPVDMGSLASAWEVEAMPLRLLPAWKVPTLLALGLFVCFYAYNFVRDVLQPYVQESQNKFFKLPVSVVNTTLPCVAYVLLSLVYLPGVLAAALQLRRGTKYQRFPDWLDHWLQHRKQIGLLSFFCAALHALYSFCLPLRRAHRYDLVNLAVKQVLANKSHLWVEEEVWRMEIYLSLGVLALGTLSLLAVTSLPSIANSLNWREFSFVQSSLGFVALVLSTLHTLTYGWTRAFEESRYKFYLPPTFTLTLLVPCVVILAKALFLLPCISRRLARIRRGWERESTIKFTLPTDHALAEKTSHV

SEQ ID NO: 2120 - DNA, 2070 bp, Homo sapien
gacagcaaatacttccgtaaaacagaccatcaagctttccacttagagcccagtgtggccccaatacctttccttgtcgctcctgcgtgccagtccgcctccgcgtggtccggccgctgcgccacgcccccgctcgccccgcccctggatttgctccctcaaagctgaagtgaggccgggctgaggctcttacagtggtccctgctggcccttggtgacgggtcgcctcagttccgacccggacccgtacgctgctgcgctgacgtggctcccggaagtagggctggcgtagggccgccatgttgcagcaggatagtaatgatgacactgaagatgtttcactgtttgatgcggaagaggagacgactaatagaccaagaaaagccaaaatcagacatccagtagcatcgtttttccacttattctttcgagtcagtgcaatcatcgtctatcttctctgtgagttgctcagcagcagctttattacctgtatggtgacaattatcttgttgttgtcgtgtgacttttgggcagtgaagaatgtcacaggtagactaatggttggcctacgttggtggaatcacattgatgaagatggaaagagccattgggtgtttgaatctagaaaggagtcctctcaagagaataaaactgtgtcagaggctgaatcaagaatcttttggttgggacttattgcctgtccagtactgtgggtgatatttgcctttagtgcactcttctccttcagagtaaagtggttggcggtggttatcatgggtgtggtgctacaaggtgccaacctgtatggttacatcaggtgtaaggtgcgcaagaaaagcatttaaccagcatggctacttcatattttggaaagcagtttttaagacaaaacactggagatgatcagacttcctgaatagagaaagcttatgtgctttgttacattggggaacaactgaagagattcttgactcaaccttttagagcttagtccatgttgcaacgaggagtgttggctttgtttttccacttaaaaactttatttataaaaaggaaaagtagttttcatattaagtttttatttcctttccagcagttggggctagaaagtatgtgttggcactagaaacattgtcaagatttgttctgtggtgtaggtatgcacattccataggtatgcacacggccatgtaatatcagtatatcccaagttaatgaaagtgttcatttacataggtaatggagacctttgcattttgatccatagaacataggaggatgttcttagtctgtctcaaagctctatatgtttacatattatttctgtaggattgttttcaggagaaagttttgcttctatgggtaaggagtgaggcactttgggcttatgtataagttagaaataattgttagtttttaatatgcacttcgtggggaaatttcttagacgtatgcaagcaagtgaaaacaattagggccagtggtattaactactttataaaattttatttttgtttgtaagaagtcatctacttaaggcccagttaatataagtggaatcatcatagtttaaggaatacccagagattgctgctgttctatttattttacagaaagggtagctagattgaaagctcttcagtggaccttgagctaatagatcttttaccactaaaagagcattattctcatgtcataatgagaataataatttacatacttggcataataaatgcctaaaagacattttattttctgaatctatttttttcttgctataatggggatattgtaaattatgcatttgtattaatggtatttcttaaagcaatctatgtaactgtaaattaaaccaatctacaaactattgtaggcatctgtaaattctgttgtaggtattataaactttgttgaagtcttaatcagcagattatgttgtgaatatatttgtacattgttaaaatagtttttaagattatttgtttaattgaataagtgtcttattggagtgatagctttgaaggtgcaaaactttatatttgtataaaattctactatttacaaggcaaa

SEQ ID NO: 2121 - protein, 181 aa, Homo sapien
MLQQDSNDDTEDVSLFDAEEETTNRPRKAKIRHPVASFFHLFFRVSAIIVYLLCELLSSSFITCMVTIILLLSCDFWAVKNVTGRLMVGLRWWNHIDEDGKSHWVFESRKESSQENKTVSEAESRIFWLGLIACPVLWVIFAFSALFSFRVKWLAVVIMGVVLQGANLYGYIRCKVRKKSI

SEQ ID NO: 2122 - DNA, 716 bp, Homo sapien
acggtggagcggtggagggcgtcactgggtttcggcgtctggcaagcggttcagctgtctgctccctagcagccggccttcgggtcgggcgtctccgcggctactgccgcttcagttctcccggtgtggccacgagtcgggttgcactgctgtgatccatcctcatctcctaaagatgcatcctgacttatctccacacttgcacactgaagaatgcaacgtcttgattaacttgcttaaggaatgtcacaaaaatcacaacattctgaaattttttggttattgtaatgatgttgatcgggagttgagaaaatgcctgaagaatgagtacgtagaaaacaggaccaagagcagggagcatggcattgcaatgcgaaagaaactttttaatcctccagaggaatccgaaaaataaattgtattttcactcgatgccttggctgagagaagacctaaagactctgggttgatacctgaaagaatcctgtcttatttggtctccataatcctttgaatggaaagtgacctgtgagagattgaaccatggagaaatatgaaaaccctggattctgagtatttgttgggcagggcgtttagtactgtctcccctttaccagcaaacctgacttcaccatgtttattccctttgcctacaaccagttaatatctgagtaacttatctccttcaataaaataatttaaataaaaaaaaaaaa

SEQ ID NO: 2123 - protein, 79 aa, Homo sapien
MHPDLSPHLHTEECNVLINLLKECHKNHNILKFFGYCNDVDRELRKCLKNEYVENRTKSREHGIAMRKKLFNPPEESEK

SEQ ID NO: 2124 - DNA, 1199 bp, Homo sapien
tagccccgcctctcgcctcgccgcctcgccgtcccgccgccttgccgccctgccaccctgccgccctgccgccctgccgccctgccgccctgccgccctgccgccctgccgccggtggtcgctgcccgtggtgctccgtcgcccccgccacctcacgtcctcccgtgcgtcgggagcgtctcggctacaacatgttgggcatgatcaagaactcgctgttcggaagcgtagagacgtggccttggcaggtcctaagcaaaggggacaaggaagaagttgcctatgaagaaagggcctgtgaaggcggcaaatttgccacagtagaagtgacagataagcctgtggatgaggctctacgggaagcaatgcccaaggtcgcaaagtatgcggggggcaccaatgacaagggaattgggatggggatgacagtccctatttcctttgctgtgttccccaatgaagatggctctctgcagaagaaattaaaagtctggttccggattccaaaccaatttcaaagcgacccaccagctcccagtgacaaaagcgttaagattgaggaacgggaaggcatcactgtctattccatgcagtttggtggttatgccaaggaagcagactacgtagcacaagccacccgtctgcgtgctgccctggagggcacagccacctaccggggggacatctacttctgcacgggttatgaccctcccatgaagccctacggacggcgcaatgagatctggctgttgaagacatgagtgacccactgaaccaagaacttactggaagtgtgcctctgtgtctccttcctcgggggtaaggaggggacagtgcttcccaagttccagctgcaagtccaacttaaccaactttccttcaaagtcagttactgccaattttctgaaaaaagcatgttccatatactaagtctcttttctcacggtaggaaataatacagccaagatatgcagcatccttctcattgatgtagaaaattctgcgatagaccagaaaaatcctggcagcttttctccaggcatctgggtcactaaaaactgattttctaaaattattggatttgtattttgttattaagggggaaaatgtgatttgtgcctgatctttcatctgtgattcttataagagctttgtcttcagaaaaactaaaaataaaaggcattgacttaaacagctga

SEQ ID NO: 2125 - protein, 189 aa, Homo sapien
MLGMIKNSLFGSVETWPWQVLSKGDKEEVAYEERACEGGKFATVEVTDKPVDEALREAMPKVAKYAGGTNDKGIGMGMTVPISFAVFPNEDGSLQKKLKVWFRIPNQFQSDPPAPSDKSVKIEEREGITVYSMQFGGYAKEADYVAQATRLRAALEGTATYRGDIYFCTGYDPPMKPYGRRNEIWLLKT

SEQ ID NO: 2126 - DNA, 2684 bp, Homo sapien
aataacctggagccggcggcgtaggttggctctttagggcttcaccccgaagctccaccttcgctcccgtctttctggaaacaccgctttgatctcggcggtgcgggacaggtacctcccggctgctgcgggtgccctggatccagtcggctgcaccaggcgagcgagacccttccctggtggaggctcagagttccggcagggtgcatccggcctgtgtgtggcgcgaggcagggaagccggtacccgggtcctggccccagcgctgacgttttctctcccctttcttctctcttcgcggttgcggcgtcgcagacgctagtgtgagcccccatggcagatacgaccccgagcggcccccaaggggcgggcgctgtgcaattcatgatgaccaataaactggacacggcaatgtggctttctcgcttgttcacagtttactgctctgctctgtttgttctgcctcttcttgggttgcatgaagcagcaagcttttaccaacgtgctttgctggcaaatgctcttaccagtgctctgaggctgcatcaaagattaccacacttccagttaagcagagcattcctggcccaggctttgttagaggacagctgccactacctgttgtattcactcatctttgtaaattcctatccagttacaatgagtatcttcccagtcttgttattctctttgcttcatgctgccacatatacgaaaaaggtccttgacgcaaggggctcaaatagtttacctctgctgagatctgtcttggacaaattaagtgctaatcaacaaaatattctgaaattcattgcttgcaatgaaatattcctgatgcctgcgacagtttttatgctttttagtggtcaaggaagtttgctccaaccttttatatactatagatttcttacccttcgatattcgtctcgaagaaacccatattgtcggaccttatttaatgaactgaggattgttgttgaacacataataatgaaacctgcttgcccactgtttgtgagaagactttgtctccagagcattgcctttataagcagattggcaccaacagttccatagtttaacatctagttaagctacaaatatagtataagcattattagcagctggtacttctgctaggggttgtaaattccaggtgttacactgacctcaatccaatttacataatttacataaatgcatctcggtggaaaaataatcattttcttggcatgttaaatcaagcttaaaaagttttgagaaaattttactgtgctgtgttgctaatggttaaagaagtctgtatctagtgataaatataccagtttttttaaaaagatgctgttgtgcctatatcatgaagtacattaatttctcatgtaaaaaaaatagctctaaaatttgtttcaacctaattggtaacctgagtttatatctggcatgaattcattatggtgatacacatatgtgaattcagtacattttgagacagtattctaccattcagtaattttggttaatgattttaacacttctcagtgtatttaatttcaaattgtttttttaattggttttatgctgctttgttaggacagatgtgttttgaatgtaccattataagaagaattctatgtatcttaaactatgatcttctaaaattttatttccgtaagtacttctgtggccttgagtattttttaaaaggctcaactgtaagcctcttagccagttggataaatatttggggtcacctagccattgaaagcagaaagcagtagtgacacagctttcccttcaaagagccattgagaaacatttctcaaacaggaaatccttcttttactaatgtggacatatagattattcgtattatagtttgtagaactacctagttcagaatcttgactgccagttttcttggtttcttaggcttgaattttcatagacaattgcaacagtttagatgccttttgaaaggaatgtaatgaagattcagcatctgactatatgtgtgtctatcctgaaataataatggagagtatactgtagattacatgtttacccatcaaatctgacttaaaaggttaaatggaaggttttataggtaaggtaattgattgggaatggggtagggggaggagttgtgggggaataatgtgcatttcagtctcaacgcatagataaatttaggggaattggatgcattattcaactttgatttgggttgtaaaatgtgttaaatcctgttcattgaactcccatcaactcttatgaaattcatgctgatcttcattaccgttgcatgattggaaatgtttaaaacattgtacagttttagtatagagaaatgtaatggtttttgtgaccagtttctgtctgcatgtaatttggatttctcaaatacattcattagtaatttatcagtaacattagttttatttttgttcatctccttatctataaaaaggggatattcttaggataaatacatgaaaaattatacttgatagcttaactataatcagctatttttgtatttttgtaatatttgtccactaagctggagaagcagcctcatacagttgattttgtgtatgtggctagtcttattgtcactatgtaagtaatccaatggttttagaaactaaactttctagagcaataaaatgactataatgttaagt

SEQ ID NO: 2127 - protein, 247 aa, Homo sapien
MADTTPSGPQGAGAVQFMMTNKLDTAMWLSRLFTVYCSALFVLPLLGLHEAASFYQRALLANALTSALRLHQRLPHFQLSRAFLAQALLEDSCHYLLYSLIFVNSYPVTMSIFPVLLFSLLHAATYTKKVLDARGSNSLPLLRSVLDKLSANQQNILKFIACNEIFLMPATVFMLFSGQGSLLQPFIYYRFLTLRYSSRRNPYCRTLFNELRIVVEHIIMKPACPLFVRRLCLQSIAFISRLAPTVP

SEQ ID NO: 2128 - DNA, 3299 bp, Homo sapien
ataataattaggccaagcgttgaatagtacggggggggggggggggcgagccccggcggctctggccgcggccgcactcagcgccacgcgtcgaaagcgcaggccccgaggacccgccgcactgacagtatgagccgcacagcctacacggtgggagccctgcttctcctcttggggaccctgctgccggctgctgaagggaaaaagaaagggtcccaaggtgccatccccccgccagacaaggcccagcacaatgactcagagcagactcagtcgccccagcagcctggctccaggaaccgggggcggggccaagggcggggcactgccatgcccggggaggaggtgctggagtccagccaagaggccctgcatgtgacggagcgcaaatacctgaagcgagactggtgcaaaacccagccgcttaagcagaccatccacgaggaaggctgcaacagtcgcaccatcatcaaccgcttctgttacggccagtgcaactctttctacatccccaggcacatccggaaggaggaaggttcctttcagtcctgctccttctgcaagcccaagaaattcactaccatgatggtcacactcaactgccctgaactacagccacctaccaagaagaagagagtcacacgtgtgaagcagtgtcgttgcatatccatcgatttggattaagccaaatccaggtgcacccagcatgtcctaggaatgcagacccaggaagtcccagacctaaaacaaccagattcttacttggcttaaacctagaggccagaagaacccccagctgcctcctggcaggagcctgcttgtgcgtagttcgtgtgcatgagtgtggatgggtgcctgtgggtgtttttagacaccagagaaaacacagtctctgctagagagcacttcctattttgtaaacctatctgctttaatggggatgtaccagaaacccacctcaccccggctcacatctaaaggggcggggccgtggtctggttctgactttgtgtttttgtgccctcctggggaccagaatctcctttcggaatgaatgttcatggaagaggctcctctgagggcaagagacctgttttagtgctgcattcgacatggaaaagtccttttaacctgtgcttgcatcctcctttcctcctcctcctcacaatccatctcttcttaagttgacagtgactatgtcagtctaatctcttgtttgccagggttcctaaattaattcacttaaccatgatgcaaatgtttttcatttggtgaagacctccagactctgggagaggctggtgtgggcaaggacaagcaggatagtggagtgagaaagggagggtggagggtgaggccaaatcaggtccagcaaaagtcagtagggacattgcagaagcttgaaaggccaataccagaacacaggctgatgcttctgagaaagtcttttcctagtatttaacaaaacccaagtgaacagaggagaaatgagattgccagaaagtgattaactttggccgttgcaatctgctcaaacctaacaccaaactgaaaacataaatactgaccactcctatgttcggacccaagcaagttagctaaaccaaaccaactcctctgctttgtccctcaggtggaaaagagaggtagtttagaactctctgcataggggtgggaattaatcaaaaacctcagaggctgaaattcctaatacctttcctttatcgtggttatagtcagctcatttccattccactatttcccataatgcttctgagagccactaacttgattgataaagatcctgcctctgctgagtgtacctgacagtagtctaagatgagagagtttagggactactctgttttaacaagaaatattttgggggtctttttgttttaactattgtcaggagattgggctaaagagaagacgacgagagtaaggaaataaagggaattgcctctggctagagagtagttaggtgttaatacctggtagagatgtaagggatatgacctccctttctttatgtgctcacttgaggatctgaggggaccctgttaggagagcatagcatcatgatgtattagctgttcatctgctactggttggatggacataactattgtaactattcagtatttactggtaggcactgtcctctgattaaacttggcctactggcaatggctacttaggattgatctaagggccaaagtgcagggtgggtgaactttattgtactttggatttggttaacctgttttcctcaagcctgaggttttatatacaaactccctgaatactctttttgccttgttacttctcagcctcctagccaagtcctatgtaatatggaaaacaaacactgcagacttgagattcagttgccgatcaaggctctggcattcagagaacccttgcaactcgagaagctgtttttgatttcgtttttgttttgaaccggtgctctcccatctaacaactaacaaggaccatttccaggcgggagatattttaaacacccaaaatgttgggtctgatttccaaacttttaaactcactactgatgattctcacgctaggcgaatttgtccaaacacatagtgtgtgtgttttgtatacactgtatgaccccaccccaaatctttgtattgtccacattctccaacaataaagcacagagtggatttaattaagcacacaaatgctaaggcagaattttgagggtgggagagaagaaaagggaaagaagctgaaaatgtaaaaccacaccagggaggaaaaatgacattcagaaccaccaaacactgaatttctcttgttgttttaactctcccacaagaatgcaatttcgttaatggagatgacttaagttggcagcagtaatcttcttttaggagcttgtaccacagtcttgcacataagtgcagatttgccccaagtaaagagaatttcctcaacactaacttcacggggataatcaccacgtaactacccttaaagcatatcactagccaaagaggggaatatctgttcttcttactgtgcctatattaagactagtacaaatgtggtgtgtcttccaactttcattgaaaatgccatatctataccatattttattcgagtcactgatgatgtaatgatatattttttcattattatagtagaatatttttatggcaagagatttgtggtcttgatcatacctattaaaataatgccaaacaccaaatatgaattttatgatgtacactttgtgcttggcattaaaagaaaaaaacacacacgcc

SEQ ID NO: 2129 - protein, 184 aa, Homo sapien
MSRTAYTVGALLLLLGTLLPAAEGKKKGSQGAIPPPDKAQHNDSEQTQSPQQPGSRNRGRGQGRGTAMPGEEVLESSQEALHVTERKYLKRDWCKTQPLKQTIHEEGCNSRTIINRFCYGQCNSFYIPRHIRKEEGSFQSCSFCKPKKFTTMMVTLNCPELQPPTKKKRVTRVKQCRCISIDLD

SEQ ID NO: 2130 - DNA, 4049 bp, Homo sapien
gcggccgcactcagcgccacgcgtcgaaagcgcaggccccgaggacccgccgcactgacagtatgagccgcacagcctacacggtgggagccctgcttctcctcttggggaccctgctgccggctgctgaagggaaaaagaaagggtcccaaggtgccatccccccgccagacaaggcccagcacaatgactcagagcagactcagtcgccccagcagcctggctccaggaaccgggggcggggccaagggcggggcactgccatgcccggggaggaggtgctggagtccagccaagaggccctgcatgtgacggagcgcaaatacctgaagcgagactggtgcaaaacccagccgcttaagcagaccatccacgaggaaggctgcaacagtcgcaccatcatcaaccgcttctgttacggccagtgcaactctttctacatccccaggcacatccggaaggaggaaggttcctttcagtcctgctccttctgcaagcccaagaaattcactaccatgatggtcacactcaactgccctgaactacagccacctaccaagaagaagagagtcacacgtgtgaagcagtgtcgttgcatatccatcgatttggattaagccaaatccaggtgcacccagcatgtcctaggaatgcagccccaggaagtcccagacctaaaacaaccagattcttacttggcttaaacctagaggccagaagaacccccagctgcctcctggcaggagcctgcttgtgcgtagttcgtgtgcatgagtgtggatgggtgcctgtgggtgtttttagacaccagagaaaacacagtctctgctagagagcactccctattttgtaaacatatctgctttaatggggatgtaccagaaacccacctcaccccggctcacatctaaaggggcggggccgtggtctggttctgactttgtgtttttgtgccctcctggggaccagaatctcctttcggaatgaatgttcatggaagaggctcctctgagggcaagagacctgttttagtgctgcattcgacatggaaaagtccttttaacctgtgcttgcatcctcctttcctcctcctcctcacaatccatctcttcttaagttgatagtgactatgtcagtctaatctcttgtttgccaaggttcctaaattaattcacttaaccatgatgcaaatgtttttcattttgtgaagaccctccagactctgggagaggctggtgtgggcaaggacaagcaggatagtggagtgagaaagggagggtggagggtgaggccaaatcaggtccagcaaaagtcagtagggacattgcagaagcttgaaaggccaataccagaacacaggctgatgcttctgagaaagtcttttcctagtatttaacagaacccaagtgaacagaggagaaatgagattgccagaaagtgattaactttggccgttgcaatctgctcaaacctaacaccaaactgaaaacataaatactgaccactcctatgttcggacccaagcaagttagctaaaccaaaccaactcctctgctttgtccctcaggtggaaaagagaggtagtttagaactctctgcataggggtgggaattaatcaaaaacckcagaggctgaaattcctaatacctttcctttatcgtggttatagtcagctcatttccattccactatttcccataatgcttctgagagccactaacttgattgataaagatcctgcctctgctgagtgtacctgacagtaagtctaaagatgaragagtttagggactactctgttttagcaagaratattktgggggtctttttgttttaactattgtcaggagattgggctaragagaagacgacgagagtaaggaaataaagggrattgcctctggctagagagtaagttaggtgttaatacctggtagaaatgtaagggatatgacctccctttctttatgtgctcactgaggatctgaggggaccctgttaggagagcatagcatcatgatgtattagctgttcatctgctactggttggatggacataactattgtaactattcagtatttactggtaggcactgtcctctgattaaacttggcctactggcaatggctacttaggattgatctaagggccaaagtgcagggtgggtgaactttattgtactttggatttggttaacctgttttcttcaagcctgaggttttatatacaaactccctgaatactctttttgccttgtatcttctcagcctcctagccaagtcctatgtaatatggaaaacaaacactgcagacttgagattcagttgccgatcaaggctctggcattcagagaacccttgcaactcgagaagctgtttttatttcgtttttgttttgatccagtgctctcccatctaacaactaaacaggagccatttcaaggcgggagatattttaaacacccaaaatgttgggtctgattttcaaacttttaaactcactactgatgattctcacgctaggcgaatttgtccaaacacatagtgtgtgtgttttgtatacactgtatgaccccaccccaaatctttgtattgtccacattctccaacaataaagcacagagtggatttaattaagcacacaaatgctaaggcagaattttgagggtgggagagaagaaaagggaaagaagctgaaaatgtaaaaccacaccagggaggaaaaatgacattcagaaccagcaaacactgaatttctcttgttgttttaactctgccacaagaatgcaatttcgttaatggagatgacttaagttggcagcagtaatcttcttttaggagcttgtaccacagtcttgcacataagtgcagatttggctcaagtaaagagaatttcctcaacactaacttcactgggataatcagcagcgtaactaccctaaaagcatatcactagccaaagagggaaatatctgttcttcttactgtgcctatattaagactagtacaaatgtggtgtgtcttccaactttcattgaaaatgccatatctataccatattttattcgagtcactgatgatgtaatgatatattttttcattattatagtagaatatttttatggcaagatatttgtggtcttgatcatacctattaaaataatgccaaacaccaaatatgaattttatgatgtacactttgtgcttggcattaaaagaaaaaaacacacatcctggaagtctgtaagttgttttttgttactgtaggtcttcaaagttaagagtgtaagtgaaaaatctggaggagaggataatttccactgtgtggaatgtgaatagttaaatgaaaagttatggttatttaatgtaattattacttcaaatcctttggtcactgtgatttcaagcatgttttctttttctcctttatatgactttctctgagttgggcaaagaagaagctgacacaccgtatgttgttagagtcttttatctggtcaggggaaacaaaatcttgacccagctgaacatgtcttcctgagtcagtgcctgaatctttattttttaaattgaatgttccttaaaggttaacatttctaaagcaatattaagaaagactttaaatgttattttggaagacttacgatgcatgtatacaaacgaatagcagataatgatgactagttcacacataaagtccttttaaggagaaaatctaaaatgaaaagtggataaacagaacatttataagtgatcagttaatgcctaagagtgaaagtagttctattgacattcctcaagatatttaatatcaactgcattatgtattatgtctgcttaaatcatttaaaaacggcaaagaattatatagactatgaggtaccttgctgtgtaggaggatgaaaggggagttgatagtctcataaaactaatttggcttcaagtttcatgaatctgtaactagaatttaattttcaccccaataatgttctatatagcctttgctaaagagcaactaataaattaaacctattctttcaaaaaaaaa

SEQ ID NO: 2131 - protein, 184 aa, Homo sapien; identical to SEQ ID NO: 2129

SEQ ID NO: 2132 - DNA, 1680 bp, Homo sapien
gcccgctgttgcgtgctgccagcgggaactgtgtaggggtagattttcgctgcagtgttccccgagcctgttagacgcagcgcgccgggagactgagagaggaaaggatagaggaagtgctgccctaggctgcatgagtcgaagcaagcgtgtttccttcccgccaggcaagtgcccttagaaaccgggccccgcccccttcctggcctgcattcccatcccctctcccggggcggaggtgaggacctctttggttcctttggttctgtcagtgagccccttccttggccatgaagctcgtgaggaagaacatcgagaaggacaatgcgggccaggtgaccctggtccccgaggagcctgaggacatgtggcacacttacaacctcgtgcaggtgggcgacagcctgcgcgcctccaccatccgcaaggtacagacagagtcctccacgggcagcgtgggcagcaaccgggtccgcactaccctcactctctgcgtggaggccatcgacttcgactctcaagcctgccagctgcgggttaaggggaccaacatccaagagaatgagtatgtcaagatgggggcttaccacaccatcgagctggagcccaaccgccagttcaccctggccaagaagcagtgggatagtgtggtactggagcgcatcgagcaggcctgtgacccagcctggagcgctgatgtggcggctgtggtcatgcaggaaggcctcgcccatatctgcttagtcactcccagcatgaccctcactcgggccaaggtggaggtgaacatccctaggaaaaggaaaggcaattgctctcagcatgaccgggccttggagcggttctatgaacaggtggtccaggctatccagcgccacatacactttgatgttgtaaagtgcatcctggtggccagcccaggatttgtgagggagcagttctgcgactacatgtttcaacaagcagtgaagaccgacaacaaactgctcctggaaaaccggtccaaatttcttcaggtacatgcctcctccggacacaagtactccctgaaagaggccctttgtgaccctactgtggctagccgcctttcagacactaaagctgctggggaagtcaaagccttggatgacttctataaaatgttacagcatgaaccggatcgagctttctatggactcaagcaggtggagaaggccaatgaagccatggcaattgacacattgctcatcagcgatgagctcttcaggcatcaggatgtagccacacggagccggtatgtgaggctggtggacagtgtgaaagagaatgcaggcaccgttaggatattctctagtcttcacgtttctggggaacagctcagccagttgactggggtagctgccattctccgcttccctgttcccgaactttctgaccaagagggtgattccagttctgaagaggattaatgattgaaacttaaaattgagacaatcttgtgtttcctaaactgttacagtacatttctcagcatccttgtgacagaaagctgcaagaagggcactttttgattcatacagggatttcttatgtctttggctacactagatattttgtgattggcaagacatgtatttaaacataaactaaaaggaaataaaaaaaaaaaaaaaaaaaaaaaaaaaaaaaaaaaaaaaaaaa

SEQ ID NO: 2133 - protein, 385 aa, Homo sapien
MKLVRKNIEKDNAGQVTLVPEEPEDMWHTYNLVQVGDSLRASTIRKVQTESSTGSVGSNRVRTTLTLCVEAIDFDSQACQLRVKGTNIQENEYVKMGAYHTIELEPNRQFTLAKKQWDSVVLERIEQACDPAWSADVAAVVMQEGLAHICLVTPSMTLTRAKVEVNIPRKRKGNCSQHDRALERFYEQVVQAIQRHIHFDVVKCILVASPGFVREQFCDYMFQQAVKTDNKLLLENRSKFLQVHASSGHKYSLKEALCDPTVASRLSDTKAAGEVKALDDFYKMLQHEPDRAFYGLKQVEKANEAMAIDTLLISDELFRHQDVATRSRYVRLVDSVKENAGTVRIFSSLHVSGEQLSQLTGVAAILRFPVPELSDQEGDSSSEED

SEQ ID NO: 2134 - DNA, 3263 bp, Homo sapien
ggcatcactcgagcccaggtcccagtcatcaccactcacagcgctcggcgttcaggaagaggagcaccagcggagcgcggctgcttcagcggcgggcgggcgccagaaaggccccgatcgaaaagcctgggagggccgccgaactacccccggagggaggagccagtccgaacccaaggcgccaccgccgcagaagcggagcgaggcagcattcgcctccatggcccactcgccggtggctgtccaagtgcctgggatgcagaataacatagctgatccagaagaactgttcacaaaattagagcgcattgggaaaggctcatttggggaagttttcaaaggaattgataaccgtacccagcaagtcgttgctattaaaatcatagaccttgaggaagccgaagatgaaatagaagacattcagcaagaaataactgtcttgagtcaatgtgacagctcatatgtaacaaaatactatgggtcatatttaaaggggtctaaattatggataataatggaatacctgggcggtggttcagcactggatcttcttcgagctggtccatttgatgagttccagattgctaccatgctaaaggaaattttaaaaggtctggactatctgcattcagaaaagaaaattcaccgagacataaaagctgccaatgtcttgctctcagaacaaggagatgttaaacttgctgattttggagttgctggtcagctgacagatacacagattaaaagaaatacctttgtgggaactccattttggatggctcctgaagttattcaacagtcagcttatgactcaaaagctgacatttggtcattgggaattactgctattgaactagccaagggagagccacctaactccgatatgcatccaatgagagttctgtttcttattcccaaaaacaatcctccaactcttgttggagactttactaagtcttttaaggagtttattgatgcttgcctgaacaaagatccatcatttcgtcctacagcaaaagaacttctgaaacacaaattcattgtaaaaaattcaaagaagacttcttatctgactgaactgatagatcgttttaagagatggaaggcagaaggacacagtgatgatgaatctgattccgagggctctgattcggaatctaccagcagggaaaacaatactcatcctgaatggagctttaccaccgtacgaaagaagcctgatccaaagaaagtacagaatggggcagagcaagatcttgtgcaaaccctgagttgtttgtctatgataatcacacctgcatttgctgaacttaaacagcaggacgagaataacgctagcaggaatcaggcgattgaagaactcgagaaaagtattgctgtggctgaagccgcctgtcccggcatcacagataaaatggtgaagaaactaattgaaaaatttcaaaagtgttcagcagacgaatccccctaagaaacttattattggcttctgtttcatatggacccagagagccccaccaaacctacgtcaagattaacaatgcttaacccatgagctccatgtgccttttggatctttgcaacactgaagatttggaagaagctattaaactattttgtgatggcgtttatcattttatattttgaaaggattattttgtaaggaataacttttaatactatagtttcacctgtattctagtaaatgttgagacaccgttttgcttttaagtatccctatttcttaagttacgaggatgaatacctttcacattttgatctttagttgactctacagtcatgaaacatacaggtctttcaaagtcattctcaatattcagcttttgtaaattatcaagcttcaaaaagctttttttttaaaaaaaaaaacatgcatattctaaaaatgactattggtggggaggtgtaaataagtcataccttcttaaaacagaaaatttaagtaaagtcttttaaatgaaacctgtaaaagtattgactcttctaccaagttggtatgatattccaggcagctcaatgattatcacatttgagaccctgtgtttgaagcatttacaggcaatgtacagcaacagaggtacctcttggtgtatagtatttacattctcttttaggtagaagaggcaattttacccttatttcacatggttagaaatttaaagcaagatcatttacccaaggataggtgtttggtaatgttgaaggagttagtctggcttcatgttttacatcttcaactaaaatcccatactatctgcttggatttggagagccaaaaaataaagctgattgtcatgtgattaaatatctgatcaacaggtatgaatataacttaaatcagcatatttttgccatggtaataaattgtcctataaactatttatatatttttgttcttcataattatcactaataagcatcagtttgttgtttttaaaaggatatttaagtgagcattttctagttcatatgaaaataaccatagtacaggatgatttctgtccacacaaaggttaaattagattgcacagttaattttcacttatatttatggtactattatgtgggtgatgcctttttcttttaagcccagtacatatattatgcctgcctaagttctgaactggggctgtatttcagtagttgtagaattattgatatttagttttgatagctaatgtttaattgtttggatctgcacagtttggtttttgcacaaaagtcatttaaaaaaatctgagtaattgtcaaatattaaaagaaagatattcttcctgtaaggaatacagtttttagtcaaagtggccattacatcctctttttaatttacataatacagatacttgagaaagttgttgtggtgttgtatgccaagaaaattctttttattggtgcctatattgtaacaattatttttaatgcattgtattttgaagtaacggttcagttaaatttttcacctgctgtgtaactgaagcacaattacagtttataatcatctgtagaagtctggagataattttgcaactcatgttatgggttaaatgaatatttttgtaaaagtaaaagcaacaaatttataaattgattatttgaaactttacaacacaattgcatcccaaatacaaattgtattgcttattcattatagctattcgtcctgtaatctgtttctaggtgaagcatactccagtgttttaggggttttgaaaataaatatttaaatttcacagtcaaaaaaa

SEQ ID NO: 2135 - protein, 416 aa, Homo sapien
MAHSPVAVQVPGMQNNIADPEELFTKLERIGKGSFGEVFKGIDNRTQQVVAIKIIDLEEAEDEIEDIQQEITVLSQCDSSYVTKYYGSYLKGSKLWIIMEYLGGGSALDLLRAGPFDEFQIATMLKEILKGLDYLHSEKKIHRDIKAANVLLSEQGDVKLADFGVAGQLTDTQIKRNTFVGTPFWMAPEVIQQSAYDSKADIWSLGITAIELAKGEPPNSDMHPMRVLFLIPKNNPPTLVGDFTKSFKEFIDACLNKDPSFRPTAKELLKHKFIVKNSKKTSYLTELIDRFKRWKAEGHSDDESDSEGSDSESTSRENNTHPEWSFTTVRKKPDPKKVQNGAEQDLVQTLSCLSMIITPAFAELKQQDENNASRNQAIEELEKSIAVAEAACPGITDKMVKKLIEKFQKCSADESP

SEQ ID NO: 2136 - DNA, 1828 bp, Homo sapien
ggcagacttaatgaagtcattagaaccttaactcaggtcattagtgtctctggggtgattggtctccagtcaaatgcagtctggcttcttggacatcttcatctatctactctatcctcaagtcaaagtagagcctctgttcctactgactatagctacttgcctgaaagcagttttattggagcagctattggcttcttcattgcaggaggaaaaaaaggtcctgaatctgtgcctccttcccttcttaaagtagtgatgaaacccatagcaactgttggagaaagctaccaatatcctcctgtgaactgggctgcacttctctctccacttatgaggctaaattttggtgaagagatccagcaactgtgccttgaaattatggtgacccaggcacagtcatcccagaatgcagctgcactattgggcttgtgggtgacaccaccactgatccacagtctgagtctgaataccaagagatatctcctgatatctgcacctctgtggataaaacacatctctgatgaacagatcctgggttttgttgaaaatttaatggtggcagtttttaaagcagcttccccacttggaagtcctgagctatgcccaagtgctttacacggtctgagccaggccatgaaactgcccagccctgcccaccacctctggagtctgctctctgaagctactgggaaaatttttgacctcctgccaaataagattcggagaaaggatctagagctgtatatcagcatagcaaaatgcctcttagaaatgacagatgatgatgccaatcggatcgcccaggttactaagagcaacatagaaaaagctgcctttgtcaaactgtacttagtctctcaaggacgattccccttggtgaacctgaccgatatgctgagcgttgctgtgcagcaccgtgagaaagaggtgttggcctggatgattctgcacagcttataccaggcacggattgtgagccatgccaatacgggcgttttgaagagaatggagtggctcttggaactgatgggttatatgaaatgttgcttaccagtcaacatcctttcacaatacggctcttgacgaggctttggacttcttcttgctgatatttgcaaccgcagtggttgcatgggctgaccacactgcccctctcctcctcggcctcagtgccagttggttgccatggcatcaggagaatggcccggctgggccagtaccaagcttccttggcaggagtccaatgcacagggtcactctgcaggaggttctcactctccttcccaatagcatggctctgctgctgcagaaagagccatggaaggaacagacccagaagttcattgactggctattcagcatcatggaaagccctaaagaagccctctcagcacagtccagggatcttttgaaagccaccctgctgtccttgagagttctcccagagtttaagaagaaagctgtatggaccagagcatatggttggtgaacagttttgcagtaaccagcagcattctcagctggatgaggaaaaccatataagtggaagaagtttttcagaattcatgcctggtattgctgagacatgatgcagagagttaagggtcatgaaaagatggccacatcactgacagcttgacacatgcctcctaagagaggagtgcattgctttagtacccgggccagttgagactgaaacaggaacttggattttctttatttggcttgagttcaatgtggagattttctttgtgaaagcttgaagatattatcttctccctgctaaattccagtaaaataatgttgtcaaaaaaaaaaaaaaaaa

SEQ ID NO: 2137 - protein, 275 aa, Homo sapien
MKPIATVGESYQYPPVNWAALLSPLMRLNFGEEIQQLCLEIMVTQAQSSQNAAALLGLWVTPPLIHSLSLNTKRYLLISAPLWIKHISDEQILGFVENLMVAVFKAASPLGSPELCPSALHGLSQAMKLPSPAHHLWSLLSEATGKIFDLLPNKIRRKDLELYISIAKCLLEMTDDDANRIAQVTKSNIEKAAFVKLYLVSQGRFPLVNLTDMLSVAVQHREKEVLAWMILHSLYQARIVSHANTGVLKRMEWLLELMGYMKCCLPVNILSQYGS

SEQ ID NO: 2138 - DNA, 1720 bp, Homo sapien
agaagggcaacctcgtgctttctgcagaggagaccggagggcagaaggcagagtccaggcttagactgcagttcctcgcttacctgtgcagtctaattttgagctgcctctttgtagtcttaaaaggcaggagcttcgtgttgtgggtctgctaacccgtacgtttccgtgggcaagtcgtgtgtactcctcgccatggctcagctccaaacacgcttctacactgataacaagaaatatgccgtagatgatgttcccttctcaatccctgctgcctctgaaattgccgaccttagtaacatcatcaataaactactaaaggacaaaaatgagttccacaaacatgtggagtttgatttccttattaagggccagtttctgcgaatgcccttggacaaacacatggaagtggagaacatctcatcagaagaagttgtggaaatagaatacgtggagaagtgtaccgcaccccagccagagcaatgcatgttccatgatgactggatcagttcaattaaaggggcagaggaatggatcttgactggttcttatgataagacttctcggatctggtccttggaaggaaagtcaataatgacaattgtgggacatacggatgttgtaaaagatgtggcctgggtgaaaaaagatagtttgtcctgcttattattgagtgcttctatggatcagactattctcttatgggagtggaatgtagagagaaacaaagtgaaagccctacactgctgtagaggtcatgctggaagtgtagattctatagctgttgatggctcaggaactaaattttgcagtggctcctgggataagatgctaaagatctggtctacagtccctacagatgaagaagatgaaatggaggagtccacaaatcgaccaagaaagaaacagaagacagaacagttgggactaacaaggactcccatagtgaccctctctggccacatggaggcagtttcctcagttctgtggtcagatgctgaagaaatctgcagtgcatcttgggaccatacaattagagtgtgggatgttgggtctggcagtcttaagtcaactttgacaggaaataaagtgtttaattgtatttcctattctccactttgtaaacgtttagcatctggaagcacagataggcatatcagactgtgggatccccgaactaaagatggttctttggtgtcgctgtccctaacgtcacatactggttgggtgacatcagtaaaatggtctcctacccatgaacagcagctgatttcaggatctttagataacattgttaagctgtgggatacaagaagttgtaaggctcctctctatgatctggctgctcatgaagacaaagttctgagtgtagactggacagacacagggctacttctgagtggaggagcagacaataaattgtattcctacagatattcacctaccacttcccatgttggggcatgaaagtgaacaataatttgactatagagattatttctgtaaatgaaattggtagagaaccatgaaattacatagatgcagatgcagaaagcagccttttgaagtttatataatgttttcacccttcataacagctaacgtatcactttttcttattttgtatttataataagataggttgtgtttatgaaatacaaactgtggcatacattctctatacaaacttgaaattaaactgagttttacatttctcttt

SEQ ID NO: 2139 - protein, 423 aa, Homo sapien
MAQLQTRFYTDNKKYAVDDVPFSIPAASEIADLSNIINKLLKDKNEFHKHVEFDFLIKGQFLRMPLDKHMEVENISSEEVVEIEYVEKCTAPQPEQCMFHDDWISSIKGAEEWILTGSYDKTSRIWSLEGKSIMTIVGHTDVVKDVAWVKKDSLSCLLLSASMDQTILLWEWNVERNKVKALHCCRGHAGSVDSIAVDGSGTKFCSGSWDKMLKIWSTVPTDEEDEMEESTNRPRKKQKTEQLGLTRTPIVTLSGHMEAVSSVLWSDAEEICSASWDHTIRVWDVGSGSLKSTLTGNKVFNCISYSPLCKRLASGSTDRHIRLWDPRTKDGSLVSLSLTSHTGWVTSVKWSPTHEQQLISGSLDNIVKLWDTRSCKAPLYDLAAHEDKVLSVDWTDTGLLLSGGADNKLYSYRYSPTTSHVGA

SEQ ID NO: 2140 - DNA, 1668 bp, Homo sapien
cacctcgcggccgtaggctaacgtggaagtcggaccagccggccggcggaagaacctagagcgcgctgcctggcgagtcaggcgcgcggggcggcgttggtggtcttcgcggcgtaactcggcctttcctgggagggagtgatggggcgcaccggggccggggagcgggcgccagtgtagcccgcgcggcgcctggcccggagcgcggcggctgcggcggcggcggcggcgggcgctggaggcctgtgagagccgcagcccggagcgcccggcttcccacgccatggcccccatgggcatccgcctttccccactgggggtggcagtgttttgtctgctggggctcggcgtgctctaccacctctactcgggcttcttggccggccgcttcagcctcttcggcctgggcggcgagcctggcggcggcgcggcggggcccgcggccgcggccgatgggggcaccgtggacttgcgcgagatgctggctgtgtcagtgctggccgcagtccgcggcggcgacgaggtgaggcgcgtccgcgagagcaacgtcctccacgagaagtccaaggggaagacgcgcgagggagccgaggacaagatgaccagcggcgacgtgctgtccaaccgcaagatgttctacctgctcaagaccgccttccccagcgtccagattaatactgaggaacacgtggatgcagctgatcaggaggttatcttgtgggatcataagattcctgaggatatcctaaaggaagtaactactcctaaagaggtaccagcagaaagtgttactgtctggattgacccacttgatgctacacaggaatatacagaggatcttcgaaagtacgtcactactatggtgtgtgtggctgtaaatggtaaacccatgctaggagttatacataagccattttccgaatatacagcttgggcaatggtagatggtggttcaaatgtgaaagcccgctcttcctacaatgagaagaccccaaggatcgttgtgtctcgttcccattcagggatggtcaaacaggtcgctcttcagacttttggaaaccagactacaattatcccagctggtggtgctggttataaagttttagcacttttggatgtgcctgataagagtcaagaaaaagctgatttatacatccatgtgacatacatcaaaaagtgggatatatgtgctggtaatgccatcttaaaagccctaggggggcatatgactaccctgagtggtgaagaaatcagttacactggttcagacggcattgaagggggactccttgctagcatcagaatgaaccaccaggccctggtcagaaaactcccagatctagaaaagacaggacataaatgagcataactgattacagggtacagttcttcacagctgaaatggttagcctgagatgctggaagcttcaaaggattggtggagactatgcatggttaaggccatcccgaactttttaaagtatttatgaagcatcagagacttattttccctgtaatagaatgcaaaatcagggaaaatgggttgctttgtgtctcaagtattgtctttatttttgagactattttcatacagttgtcatacacaaggcgcatatatatatttgtgaattaaaatctgtagctgagtctaaaaaaaaaaaaaaaaaa

SEQ ID NO: 2141 - protein, 359 aa, Homo sapien
MAPMGIRLSPLGVAVFCLLGLGVLYHLYSGFLAGRFSLFGLGGEPGGGAAGPAAAADGGTVDLREMLAVSVLAAVRGGDEVRRVRESNVLHEKSKGKTREGAEDKMTSGDVLSNRKMFYLLKTAFPSVQINTEEHVDAADQEVILWDHKIPEDILKEVTTPKEVPAESVTVWIDPLDATQEYTEDLRKYVTTMVCVAVNGKPMLGVIHKPFSEYTAWAMVDGGSNVKARSSYNEKTPRIVVSRSHSGMVKQVALQTFGNQTTIIPAGGAGYKVLALLDVPDKSQEKADLYIHVTYIKKWDICAGNAILKALGGHMTTLSGEEISYTGSDGIEGGLLASIRMNHQALVRKLPDLEKTGHK

SEQ ID NO: 2142 - DNA, 1993 bp, Homo sapien
gcggtagcgacaggtcagagctgcggcctgagcagccagcgtccggcatgaaggtctggggtctggctgctgcctgcttcttgctccagcaccatggaatgcctgcgcagtttaccctgcctcctgccccgcgcgatgagacttccccggcggacgctgtgtgccctggccttggacgtgacctctgtgggtcctcccgttgctgcctgcggccgccgagccaacctgattggaaggagccgagcggcgcagctttgcgggcccgaccggctccgcgtggcaggtgaagtgcaccggtttagaacctctgacgtctctcaagccactttagccagtgtagccccagtatttactgtgacaaaatttgacaaacagggaaacgttacttcttttgaaaggaagaaaactgaattataccaagagttaggtcttcaagccagagatttgagatttcagcatgtaatgagtatcacagtcagaaacaataggattatcatgagaatggagtatttgaaagctgtgataactccagagtgtcttctgatattagattatcgtaatttaaacttagagcaatggctgttccgggaactcccttcacagttgtctggagagggtcaactcgttacataccctttaccttttgagtttagagctatagaagcactcctgcaatattggatcaacacccttcaggggaaacttagcattttgcagccactgatccttgagaccttggatgctttggtggaccccaaacattcttctgtagacagaagcaaactgcacattttactacagaatggcaaaagtctatcagagttagaaacagatattaaaattttcaaagagtcaattttggagatcttggatgaggaagagttgctagaagagctctgtgtatcaaaatggagtgacccacaagtctttgaaaagagcagtgctgggattgaccatgcagaagaaatggagttgctgttggaaaactactaccgattggctgacgatctctccaatgcagctcgtgagcttagggtgctgattgatgattcacaaagtattattttcattaatctggacagccaccgaaacgtgatgatgaggttgaatctacagctgaccatgggaaccttctctctttcgctctttggactaatgggagttgcttttggaatgaatttggaatcttcccttgaagaggaccatagaattttttggctgattacaggaattatgttcatgggaagtggcctcatctggaggcgcctgctttcattccttggacgacagctagaagctccattgcctcctatgatggcttctttacctaaaaagactcttctggcagatagaagcatggaattgaaaaatagcctcagactggatggacttggatcaggaaggagcatcctaacaaaccgttaggaacagccccgtggatactgaagttttttttatggtagttacaggaaacttctgatactctttttattattttcttgtatagagtcagacacttgaaaaaaactaatgtttgaagacaaaaatattttggcagtcacaataccagaactggattgcatttccagaattytgagttaaagaaacaaagtatttgctttgtaaaaggccaaaattytatttcctacaaactttaaatgctgtttttatagatgtgatatgaggcaacacaagcacagacagttgcatagattttaatttatacatatcaagaaaagtgcaatttcatgctgaatgaagcgtaggaacttgacaagcccataggtagctatagttctttgtcagtatagggaattatgttcatgtgaatttcctgattctcaggtgactaaaaagctagcattytatgtattaaccttacaacagactctgtaagtttgagctttaaaaaccaaactttgacataaccttatttcttgtatttgcccccttttttttataaaaggtgaataaaaagaaataatttaatatc

SEQ ID NO: 2143 - protein, 443 aa, Homo sapien
MECLRSLPCLLPRAMRLPRRTLCALALDVTSVGPPVAACGRRANLIGRSRAAQLCGPDRLRVAGEVHRFRTSDVSQATLASVAPVFTVTKFDKQGNVTSFERKKTELYQELGLQARDLRFQHVMSITVRNNRIIMRMEYLKAVITPECLLILDYRNLNLEQWLFRELPSQLSGEGQLVTYPLPFEFRAIEALLQYWINTLQGKLSILQPLILETLDALVDPKHSSVDRSKLHILLQNGKSLSELETDIKIFKESILEILDEEELLEELCVSKWSDPQVFEKSSAGIDHAEEMELLLENYYRLADDLSNAARELRVLIDDSQSIIFINLDSHRNVMMRLNLQLTMGTFSLSLFGLMGVAFGMNLESSLEEDHRIFWLITGIMFMGSGLIWRRLLSFLGRQLEAPLPPMMASLPKKTLLADRSMELKNSLRLDGLGSGRSILTNR

SEQ ID NO: 2144 - DNA, 962 bp, Homo sapien
gtggtgcttgtctgcagagtcatgacctctttccgcttggccctcatccagcttcagatttcttccatcaaatcagataacgtcactcgcgcttgtagcttcatccgggaggcagcaacgcaaggagccaaaatagtttctttgccggaatgctttaattctccatatggagcgaaatattttcctgaatatgcagagaaaattcctggtgaatccacacagaagctttctgaagtagcaaaggaatgcagcatatatctcattggaggctctatccctgaagaggatgctgggaaattatataacacctgtgctgtgtttgggcctgatggaactttactagcaaagtatagaaagatccatctgtttgacattgatgttcctggaaaaattacatttcaagaatctaaaacattgagtccgggtgatagtttctccacatttgatactccttactgcagagtgggtctgggcatctgctacgacatgcggtttgcagagcttgcacaaatctacgcacagagaggctgccagctgttggtatatccaggagcttttaatctgaccactggaccagcccattgggagttacttcagcgaagccgggctgttgataatcaggtgtatgtggccacagcctctcctgcccgggatgacaaagcctcctatgttgcctggggacacagcaccgtggtgaacccttggggggaggttctagccaaagctggcacagaagaagcaatcgtgtattcagacatagacctgaagaagctggctgaaatacgccagcaaatccccgtttttagacagaagcgatcagacctctatgctgtggagatgaaaaagccctaaagtttatgtttctaatgtgtcacagaataggacgatatgattctacaacataatcaactccctattaaattctttaatgaagaaaaaaaatttaaaaaaaaaaaaaaaaa

SEQ ID NO: 2145 - protein, 276 aa, Homo sapien
MTSFRLALIQLQISSIKSDNVTRACSFIREAATQGAKIVSLPECFNSPYGAKYFPEYAEKIPGESTQKLSEVAKECSIYLIGGSIPEEDAGKLYNTCAVFGPDGTLLAKYRKIHLFDIDVPGKITFQESKTLSPGDSFSTFDTPYCRVGLGICYDMRFAELAQIYAQRGCQLLVYPGAFNLTTGPAHWELLQRSRAVDNQVYVATASPARDDKASYVAWGHSTVVNPWGEVLAKAGTEEAIVYSDIDLKKLAEIRQQIPVFRQKRSDLYAVEMKKP

SEQ ID NO: 2146 - DNA, 2684 bp, Homo sapien
cggaagcaggaagtgagtttgcgaacggagcagctgctgcagggcccatggcggacacccagtacatcctgcccaatgacatcggcgtgtctagcctggactgccgtgaggccttccgcctgctgtcacccacagagcgcctctatgcctaccacctgtcccgtgccgcctggtacggaggcctggctgtgctgcttcagacctcccctgaggccccctacatctatgctctgctcagccgcctcttccgcgcccaggaccccgaccagctgcgccaacatgccctggctgaaggccttaccgaggaggagtatcaggcgttcctggtctatgccgcgggtgtttactccaacatgggcaactacaagtcctttggtgacaccaagtttgttcccaacttgcccaaggaaaagctggaacgggtgatcctagggagtgaggctgctcagcagcacccagaagaagtcaggggcctctggcagacctgcggggagcttatgttctctctggagccaaggcttcgacacctcggactggggaaggagggaatcaccacctatttctctgggaattgtaccatggaagatgccaaattggcccaggactttctggactcacagaacctcagtgcctacaacacccggctcttcaaagaggtcgatggagaagggaagccctactacgaggtgcggctggcttctgtgcttggctcagagccttccctggactctgaggtgacttccaagctgaagagctatgaattccggggaagccctttccaggtgacccggggggactacgcgcccatcctccagaaggtggtggagcagctggagaaagccaaggcctatgcagccaacagccaccaggggcagatgctggcccagtatatagagagcttcacccagggctccatcgaggcccacaagaggggctcccgcttctggatccaggacaaaggccccatcgtggagagttacatcgggttcatcgagagctaccgcgacccctttggttcccgaggagaatttgaaggtttcgtagctgtggtgaacaaggccatgagtgccaagtttgagcggctggtggcgagcgcagagcagctgctgaaggagctgccctggcccccaacctttgagaaggacaagttcctcacccctgacttcacctccctggatgttctcaccttcgctggctccggcatccctgccggcatcaacatccccaactacgatgatctgaggcagacggaaggctttaagaacgtgtcgctggggaatgtgctggctgtggcctacgccacgcagcgggagaagcttacctttctggaggaggatgacaaggacctgtacatcctctggaaggggccctccttcgatgtgcaggtgggcctgcacgagctgctgggccatggcagtggcaagctcttcgtacaggacgaaaaaggagcattcaactttgaccaggaaacagtgatcaacccagagacgggcgagcagattcagagctggtatcggagcggggagacctgggatagcaagttcagcaccatcgcctccagctacgaagagtgccgggctgagagcgtgggtctctacctctgtctccacccgcaagtgctggagatctttggctttgagggggctgatgcggaggacgtgatctacgtgaactggctcaacatggttcgggccgggctgctcgctctggagttctacacacctgaggccttcaactggcgacaggcccatatgcaggcccggtttgtgatcctgagagtcttgctggaggctggcgagggactcgttaccatcactcccaccacaggctccgatgggcgcccagatgcccgggtccgcctcgaccgcagcaagatccggtctgtgggcaagcctgctctagagcgcttcctgcggagacttcaggtgctgaagtccacaggggatgtggccggagggcgggccctgtacgaggggtatgcaacggtcactgatgcgccccccgagtgcttcctcaccctcagggacacggtgctgctgcgtaaggaatctcggaagctcattgttcagcccaacactcgccttgaaggctcagacgtgcagcttctggaatacgaggcgtcagctgctggcctcatccgatccttctctgagcgtttcccagaggatggacccgagttggaggagatcctcacacagctggccacagccgatgcccgattctggaagggccccagtgaggccccatctggccaagcttgaggaagatgtgtggccttgcccccaattccatcagaccaaggctgcaagtggccctccattcgtgtgtgtatttaggggctggggagggggaggggcaggagcttggaccttggtactacctcagctgagggtggtgacacaaccccttccatttgtcagcactttccagcctgccaattgcttcccctctgtgatctcatttcatctgcactgccatacgtggagtgagcaagacagggcttaccatcctgtctaccagatgaggaaatggcagttctgagaagtcactggtctagatcccgcaggtggcacgtgacagctagggttcaaaacgttctcaccaaatccaatgctcctcacatattaattttataaccagacaaataaatattagagacaaccaaaaaaaaaaaaaaaaaaaaa

SEQ ID NO: 2147 - protein, 737 aa, Homo sapien
MADTQYILPNDIGVSSLDCREAFRLLSPTERLYAYHLSRAAWYGGLAVLLQTSPEAPYIYALLSRLFRAQDPDQLRQHALAEGLTEEEYQAFLVYAAGVYSNMGNYKSFGDTKFVPNLPKEKLERVILGSEAAQQHPEEVRGLWHTCGELMFSLEPRLRHLGLGKEGITTYFSGNCTMEDAKLAQDFLDSQNLSAYNTRLFKEVDGEGKPYYEVRLASVLGSEPSLDSEVTSKLKSYEFRGSPFQVTRGDYAPILQKVVEQLEKAKAYAANSHQGQMLAQYIESFTQGSIEAHKRGSRFWIQDKGPIVESYIGFIESYRDPFGSRGEFEGFVAVVNKAMSAKFERLVASAEQLLKELPWPPTFEKDKFLTPDFTSLDVLTFAGSGIPAGINIPNYDDLRQTEGFKNVSLGNVLAVAYATQREKLTFLEEDDKDLYILWKGPSFDVQVGLHELLGHGSGKLFVQDEKGAFNFDQETVINPETGEQIQSWYRSGETWDSKFSTIASSYEECRAESVGLYLCLHPQVLEIFGFEGADAEDVIYVNWLNMVRAGLLALEFYTPEAFNWRQAHMQARFVILRVLLEAGEGLVTITPTTGSDGRPDARVRLDRSKIRSVGKPALERFLRRLQVLKSTGDVAGGRALYEGYATVTDAPPECFLTLRDTVLLRKESRKLIVQPNTHLEGSDVQLLEYEASAAGLIRSFSERFPEDGPELEEILTQLATADARFWKGPSEAPSGQA

SEQ ID NO: 2148 - DNA, 3178 bp, Homo sapien
gaccactggtagcggcagcagctcgcgcccgcgccctcctcgtacccgtgcgcccccggagaccgatcccgccccgcggcccaggccgggcctgaacccagcgggtgccgcttctccacccgaggcttccacctccaacgagccatgttccaggctgcaggagccgcccaggccaccccctctcatgacgccaaaggcggcggcagcagcacggtgcagcgctccaagtccttcagcctgcgggcccaggtgaaggagacctgcgccgcctgccagaagaccgtgtaccccatggagcggctggtggccgacaagctcattttccacaactcttgcttctgctgcaagcactgtcacaccaagctcagcctgggcagctacgccgcgctgcacggggagttctactgcaaaccccacttccagcagctgtttaagagcaaaggcaactacgacgaggggtttggccgcaagcagcacaaggagctctgggcccacaaggaggtggaccccggcaccaagacggcctgaggcctctgtaaccttccaccccctctgcggaaggcctggagccggcagggggaaggtgggaaggaggtcgagctgggcttgcgtgggggccaggtgggaaggggatgaggcttgctcaggcgtaggggaccagggcagggctctgctccaggactccttccttcttccttctcccgcagccggtgagggtttggaaaccaggattggggtctgcccaccaccctgcttcctgcttcgttcagcctccctccccacctcaccccaggaccccctgggaggcccccaagcccagctcccctatctaggtgccttttctccagcaaggagtcagcatgcccccctcagggtcccaagctccctcactgccaccggagactgtgtggcccccacgtctccccatctacctctacccttaacctgtttctgagccacggagacagggaggaaggagcgcgacagtgccacctgttgggcatcataaatgcccctgcagcccatgggggaggagatggggaagtggagccaccctgcctctgcagggcaaggcagggcctgccccagtggggcttgggaccatctcgaaccaccagcgtggagaagcagaagcaaaagcactcgccaggctgcagcctcaggcactggcaggggctggtgcggccccactcccctcccccgctcccatttgtgcccatcctgttgtgaccaaccccgttttaaacatgtttcaatagatccagattctctattgtgtggcctgctgggggatctgtcacaggaagggtgcagactcaccatggggcgggcatggggggacagggccagccccgactacctcggccctgatgggggcagggagctagaagtgggtgtcagttccctgacacaccattgagaaatgggagggctcctcttcacagcgagggcttcatgctgtcacacccacagtggttttggaactgaaactccacctcacccctcagttctgggttggttcagacccaccaacttaccatatgcaccccattgtgaagaggcctgagagcgggagggccaggctgccagtgggtgatggcgcctgtcctcgctgcacttcagtgcctggggtgcaagctgccgcgttccctggctggttccagctgtctagctccctcccttcttcccagccctttgacctggaagtaagttagcgaagaatggcggtaaccagcagacccagcaagtgctgcccaaggttttagtgacccctggattgtcccccctcatcattacccctcgctgctgtcatcatccccttgccttttcaagctctgcggaggtgcagtcacagctactgtctcaggaaatccaaagagaaactacctctgcttctctgaaaacccagggacaatgagggatgagttcacagcagagcaaaccaggcaagttgggaggacctgagggcgccccggtgggacacaggcagaagtctgggttgtcctgctccagattcaacttcctgatgtctccagacatgggatcgatgagaacagagactcctggagggtttgctgccaccacaccatacaactgcctgagttcctaagtggcctccccgtggaacagggcagggagctgggccacaggctccagtgtcacataagtcactatgctgaggcaggcactgctcctcgagggagcagagcgaatactcagcagagatggtgccccggcctggatcctcccaagtgtgaagtgagcgcctcagagcctctcagggcaggccaacttcctgcaccagaggtctcagatggcaaggatcatcttggttcggttaagcaacagtagcagatgaccacaagggggtactggagaggtggctcttggagacacctgacccctgccctgcaaagatggggctgaaggaagtcctctgggccaggaagaccctaccaaatatcatgaaagctccgggaactcagccactggtgacgttcaggttgtgagggccagcagtgccaccctggtaaatcagccctgttgggaccaccccagtggagctcctggaggggcaactggaggaaaggggcagacacctctggactgacaatggtatcagccagatcaccccaggacccctctacttggagtcaagttctcttctgcttgaaaggcccaggctcgttgccaggcaccatacctggcccctgctaagcaaaaacctacctccaccccccacaactgaaagcactgccacaggacccctctgatataaatgatcccttttattgtaagtaatgcgcaacactggcctggctttgcactgcaagccctcggtcaagatatagtcaaataactatggctgcaggttccacagttccacaataaccatggctgcacgatccacaattcagacacagacatagagctggggtgggtggaaggggcaggagggtggcagagtgcggactgtccccagccctggcctctccatgcagagttggcccaggcagacacaccccatggaatgatgagaaagtgacggcacggccccttcccacagcaagcctggggctgccaggaactgcccttcagaacctttgggcccaggtcaccctgaagccccacaactttttatctggattagttattaaaaaacaataaattaagcaac

SEQ ID NO: 2149 - protein, 127 aa, Homo sapien
MFQAAGAAQATPSHDAKGGGSSTVQRSKSFSLRAQVKETCAACQKTVYPMERLVADKLIFHNSCFCCKHCHTKLSLGSYAALHGEFYCKPHFQQLFKSKGNYDEGFGRKQHKELWAHKEVDPGTKTA

SEQ ID NO: 2150 - DNA, 2159 bp, Homo sapien
gacccgaaacggggaagttgtcttgtttggagaggttagtagagcagcgcgcgcgtcaccagagtcgtttctcttcggagtcttaggtgatcgagggtgtgcccagggggcggacttgtttgcgcctcccgttccctcccaatttccaaacgtgtcaccccggcgccgacggccctgtgcaggggaagcagatggagttcaagctggaggctcatcgcatcgtcagcatctctctgggcaagatctacaactcgcgggtccagcgcggcggcatcaagctgcataagaacctcctggtctcgctggtgctgcgcagcgcccgccaagtctacctgagcgacccgtgccccggcctctacctggccggtcccgctgggaccccggcgccgccaccgcagcagcagcccggggagccggcggccgggccacccgccggctggggagagccgcccccgcccgccgctcgtgcctcttggccggagaccgagccgcagccggagcgctcctccgtctcagacgcgccgcgggtaggggacgaggtgccggtggccacggtgactggagtcggggacgtttttcagggcggagaggcggacgcgacggaagctgcctggagccgcgtggaggggccgcgccaggcggcggccagagaagccgagggtaccgccggaggctggggcgtcttccccgaggtatctcgtgccgcgcgccgcccctgcggctgccccctaggcggggaggacccgccgggtacaccggccgcgaccccccgcgctgcctgctgctgcgcgccgcgaccagcggaggacgagccccccgcgccgcccgcggtgtgccccaggaagcgctgcgcggcgggggtgggcggcggcccagcgggctgcccggcgcccggctcgaccccgctcaagaagccccgccggaacttagagcagccgccgagtggaggagaggacgacgacgcggaggagatggagaccgggaacgtggctaacctcatcagcatcttcggttccagtttctcgggactcctacggaaaagccccgggggcggcagagaggaagaggagggagaggagagcggtccggaagccgccgagcccgggcagatctgctgcgataagccggtgctgagagacatgaacccctggagcacagccatcgtggccttctgagcccttggtccccctgcggggaggaggtggagcagcgggcgtccccgaagtgagggccaggcccttcccggctgcgaggacgcccagagaccgcgggcgctgagcgcgttgggcagactggttgcctctgggcatcgcaaactgcccccgggcgcatctggcttatctggagacctgggagcttgaggctcattggaagaggacgatcgttaacttttgtgtttgtgtatgtctgtgtatgtaagtttgtcttgtggcattaagactattttgctcttctggaatgcaccactccttccccagggtttaagagattgggggcagacagggactttcctctgccggctgcgtggagaaggaagcggctaaaaggtttgggccggggagttccccattcgttctccggggagggagggactttacacctacccctcaccggaaagctagacccgcttcagggccaggagtggcgtttccgcacaggatttcctaagacgagagggatttagccaagagcacagacttggattccttctgtccctccccacctttctctcccaatgaagaaacgtttatatcctgtgattactctaggaaaggggcgtattaacggtcctttgcttccccgcaggggagaaaaagcttgacgaacttcacagaagagttcaagcttggaaataatggagtttatagagaaaagatatatttttaaaagctctaggtcagaagtactacacagtgcttttaaaaagtgtttaatgagagtttacagacagaagcccgaagtggaaagaccttatggttttgtagatatggtgactccagtctttgttgtataaaggttgggggagctgataaggtttttgtacagtattttctccttcgttgtattgatttttgtataaaaatgtaacttctacgtgtctaacacgtattaaatattttgaagcaaaaaaaaaaaaaaaaaaaaaaaaaaaaaaaaaa

SEQ ID NO: 2151 - protein, 327 aa, Homo sapien
MEFKLEAHRIVSISLGKIYNSRVQRGGIKLHKNLLVSLVLRSARQVYLSDPCPGLYLAGPAGTPAPPPQQQPGEPAAGPPAGWGEPPPPAARASWPETEPQPERSSVSDAPRVGDEVPVATVTGVGDVFQGGEADATEAAWSRVEGPRQAAAREAEGTAGGWGVFPEVSRAARRPCGCPLGGEDPPGTPAATPRAACCCAPRPAEDEPPAPPAVCPRKRCAAGVGGGPAGCPAPGSTPLKKPRRNLEQPPSGGEDDDAEEMETGNVANLISIFGSSFSGLLRKSPGGGREEEEGEESGPEAAEPGQICCDKPVLRDMNPWSTAIVAF

SEQ ID NO: 2152 - DNA, 2886 bp, Homo sapien
tgtttggtatatttaaagcagtgactgagtgtgtttgagtgagtggctgagtgcagtgtcttttgtttaaacacactgcctcgtgtctttgtagctgattcagagagtttgaattgtggggtgggagactaacttcagctccaggctgcagtaatgtgttggtagttacacttgaggcatttttttgttgttgttaattaactctatagtctcaaactatttttgcaaatatatcatttttcctaattggttcttgacgtgcagtggactggctctgtgaatgattggcagggtcttagttttgcgagagcatttccttctaagaattattgtgatctgcagaaacagccatttgattcaaaaatcatgtagaaaaggagtaggagaagcaaaacgtttcatttttgggccttaaccatttgaaatgtttggactttaaacataaagccatggagtttataaagccaagtaaccatttgatatggataataatatctactctagagagagtatatatatgcacattgatttttaatgctgttaagatacttttgtaaaactgtaggaacaagagtaattagaccaaattgaagcttaggggacagtaaagtggttgctttccatttagggtaaccatgcatgtggttagtcctctcctcctgagattcagaaccagttgactgtccccttaggtgtataaggagaaaagttgacatgtctgggacctctgacatgtgtacacatgcttgcacacatgcacacacagtgaatgttttaagttatacaaacataagaccttaagatgcaaagagccagaatattctaaagaggtgatgaacagagggggtggaaactgcatcacagatgttttccaagggccagggtggaatctgagctctagtgtctgactttgagatgcattatatttttaacacataaatgaggggatccatatcacattctttcttgtggaccaccaaattgaaggctttcttgtaattcacaagcagcagctctccagcatctctccgtagcctgggtgaagtcccagaagctggtgtgcatcattttccaaggtggcagagctgcttgctctgcagatcattcctttgagagaggagtacaagtgaagaaacaaggaggcacttcctgtaggagcactgatgtgccttgtccacactcccctctgagctttactggtaagagagctccgactgaacatgctgagcagttgagcacttttccatcagcaacaacagcgaggatggaaatggaaaggaaccgaactaaaatgcatttccctttgcagggcagagagctaagctcttaggaatagtgttatagaaataagcaccctaacttcaattcctgaaaatgttggttaatggagagaattttggagtttcacttaatattttcccatcggtcgccataaataagtcttcaggcgctcctagaagagtcccagcccaaggctcgattaaggaccacactgcaggtctgaggctcactgctctgagtcctgaacaccagagccctgcagagagtggtgataacacatcatctctgcaaagaggaacctctcccccggccgccacttcactcaggcttctactgagcagcaaggacagcctgggtttcaaatgccacttcccctgctttagggatccaggtgtcctgatagcgtgaccctgctgaggcaaggtatcaactccgagagtgactgagtcactgagcgtggcacatgaacaaacgtcatgacaaagattctctgagtgaagttaacaccacgtattttacctttgcaaaaaacaaactggcaccctgagttctaactacggacggacgatatctttgcctccacacccagattcctggaaatggctaacgtttcctttctaggggaagggtcgaggaatactcaagtgctagcttagcagctttgttcagtccagatcagagctgttaggtaaaggcctaaccacctccctgcagtctcttatatctcaagctttaggaacccatttctaaatgtacactagcggagaatttatattgtcagccttgattaccataggacaggcagaaaggcgataatttgtatcttttaatataaaagaagcttttaacttttccagcctattataataactgagttatattcactgtggctcaaactaattggcattgtggaacatttctttaccttcaaagttttctccaccaatcatttcagttctattgcagtcctggtgccatatgtcccctgcaaattgtgaaagtaattagtgacaaaatagcagcctgctccttttcaatggcgaaactgtcggcattagcagttttgggtaagctggcggtactataacacgtactggaaacctgttcctcatcaccacctaccagattctggaaatgccgtcttctagaaaacgatggcgtttgtggtggtcttcttttgaaaggaacagtaatttgtgtggatattgttaaagtgtttaaagaatattttgacaattaagtttacattttacaattgctttattttttattaaaatagttgtatataaatattaccctatttcactgttgttcaagtaaatctaaaccttgtagacaagtgagtcatctgatatgtatagaagctgtgatatatagagtacatttattgtgtaaatgtttatgaatataattgttcctgtgtttttataagttggggatattttgttgttttacggcaacaaaatttattgcatttaaatggtttttatgtaatagaaatcacgcaaaatagtgaaggatttaaaatatgtatatgatacatgtaaatgtacaaactttagaaagaaataaatccaacaaatttcaaaaaaaaaaaaaaaaaaa

SEQ ID NO: 2153 - protein, 104 aa, Homo sapien
MLVNGENFGVSLNIFPSVAINKSSGAPRRVPAQGSIKDHTAGLRLTALSPEHQSPAESGDNTSSLQRGTSPPAATSLRLLLSSKDSLGFKCHFPCFRDPGVLIA

SEQ ID NO: 2154 - DNA, 1712 bp, Homo sapien
cagttagcttcaaacaaaaacgaaagttagaccaagggaacgtattagatatggaagtaaagaaaaagaaacatgataaacaagaacagaaaggaagtgtgggagctacattcaaattaggtgactctttgtcaaacccaaacgaaagagccattgttaaagaaaagatggtatcaaatactaagtctgtagacacgaaagcgagttcatctaaatttagtagaattctaactcctaaggagtatttacaaaggcagaagcataaagaagctccgagtaataaagcatcgaagaaaatctgtgtgaaaaacgtgccatgtgattctgaacatatgagaccaagtaaacttgccgtgcaggttgaaagttgtgggaaatcaaatgagaaacacagcagcggcgtgcagacctctaaagaatcattaaatggcttgacaagccatggtaaaaacctcaaaatccaccattctcaggagtctaaaacatacaacattctaaggaatgttaaagaaaaagttggtgggaagcagcctgataaaatatggattgataagactaaattagacaaattaaccaatataagcaacgaagctcaattcagccaaatgcctccccaagtaaaggatcaaaagaaattatatctgaatagagttgggtttaaatgcactgaacgtgaaagcatttctctcaccaaattagaaagttcacccaggaagcttcataaagataagagacaggaaaataaacataagacctttttaccggtgaaaggtaacacagaaaaatcaaacatgctggagtttaaattatgtccagatatcttactaaagaatacaaactctgtggaagaacggaaggatgtaaagcctcatcctaggaaggagcaagcccctctgcaagtttcaggaataaaaagtacaaaagaagactggttaaaatttgttgctacaaagaaaaggacacagaaagacagccaagagagagataatgttaattcaagactctcgaagagaagcttcagtgcagatggatttgagatgctacaaaacccagtaaaagattcaaaagaaatgtttcaaacctacaaacagatgtacctggagaagagaagcagaagccttggtagcagtcctgtaaaataattacaagatgtggttttgtaattgccactgggaaatttctttccttttctgttcaaaatatttcgctgaaactaatgagaaatgccatgataaagatttctcagagtttggttcccactttcattgtatttcattgaaagtgcttaattaaaatggcttgagaactttgggtagccatgtgtaagaaatggatggtattcaccggggaaacaaggtatttgaatttctactttattgaaccagatttaccattattttaaaaggaatgcttatacaaatcaatttgaaattctacccatcttgagggaggaccgttcctcagttaaggacttgtttatttaaatgggactgtaaatatgttttggtttctaagctatattagcaaaatttatttttcaaaaacgcccactgtgatgtgaatgtcaaaatatattcttaagtgttttataactaattgtaaactttttttcagaagtcttattttatacttgtgaaactgaacacaattttgggacaacgtttaaacattacttttcatacttgaaataaacatttattttttaaaaaact

SEQ ID NO: 2155 - protein, 363 aa, Homo sapien
MEVKKKKHDKQEQKGSVGATFKLGDSLSNPNERAIVKEKMVSNTKSVDTKASSSKFSRILTPKEYLQRQKHKEAPSNKASKKICVKNVPCDSEHMRPSKLAVQVESCGKSNEKHSSGVQTSKESLNGLTSHGKNLKIHHSQESKTYNILRNVKEKVGGKQPDKIWIDKTKLDKLTNISNEAQFSQMPPQVKDQKKLYLNRVGFKCTERESISLTKLESSPRKLHKDKRQENKHKTFLPVKGNTEKSNMLEFKLCPDILLKNTNSVEERKDVKPHPRKEQAPLQVSGIKSTKEDWLKFVATKKRTQKDSQERDNVNSRLSKRSFSADGFEMLQNPVKDSKEMFQTYKQMYLEKRSRSLGSSPVK

SEQ ID NO: 2156 - DNA, 2012 bp, Homo sapien
tctgaagcgaatcagtgggaagtggcctacagtgggtcggctaccgaatacaccttcacccacttgaaaccaggcactttgtacaaactccgagcatgctgcatcagtaccggcggacacagccagtgttctgaaagtctccctgttcgcacactaagcattgcaccaggtcaatgtcgaccaccgagggttttgggtagaccaaagcacaaagaagtccacttagagtgggatgttcctgcatcggaaagtggctgtgaggtctcagagtacagcgtggagatgacggagcccgaagacgtagcctcggaagtgtaccatggcccagagctggagtgcaccgtcggcaacctgcttcctggaaccgtgtatcgcttccgggtgagggctctgaatgatggagggtatggtccctattctgatgtctcagaaattaccactgctgcagggcctcctggacaatgcaaagcaccttgtatttcttgtacacctgatggatgtgtcttagtgggttgggagagtcctgatagttctggtgctgacatctcagagtacaggttggaatggggagaagatgaagaatccttagaactcatttatcatgggacagacacccgttttgaaataagagacctgttgcctgctgcacagtattgctgtagactacaggccttcaatcaagcaggggcagggccgtacagtgaacttgtcctttgccagacgccagcgtctgcccctgaccccgtctccactctctgtgtcctggaggaggagccccttgatgcctaccctgattcaccttctgcgtgccttgtactgaactgggaagagccgtgcaataacggatctgaaatccttgcttacaccattgatctaggagacactagcattaccgtgggcaacaccaccatgcatgttatgaaagatctccttccagaaaccacctaccggatcagaattcaggctataaatgaaattggagctggaccatttagtcagttcattaaagcaaaaactcggccattaccacccttgcctcctaggctagaatgtgctgctgctggtcctcagagcctgaagctaaaatggggagacagtaactccaagacacatgctgctgaggacattgtgtacacactacagctggaggacagaaacaagaggtttatttcaatctacagaggacccagccacacctacaaggtccagagactgacggaattcacatgctactccttcagaatccaggcagcaagcgaggctggagaagggcccttctcagaaacctataccttcagcacaaccaaaagtgtcccccccaccatcaaagcacctcgagtaacacagttagaaggaaattcatgtgaaattttatgggagacggtaccatcaatgaaaggtgaccctgttaactacattctgcaggtattggttggaagagaatctgagtacaaacaggtgtacaagggagaagaagccacattccaaatctcaggcctccagaccaacacagactacaggttccgcgtatgtgcgtgtcgtcgctgtttagacacctctcaggagctaagcggagccttcagcccctctgcggcttttgtattacaacgaagtgaggtcatgcttacaggggacatggggagcttagatgatcccaaaatgaagagcatgatgcctactgatgaacagtttgcagccatcattgtgcttggctttgcaactttgtccattttatttgcctttatattacagtacttcttaatgaagtaaacccaacaaaactagaggtatgaattaatgctacacattttaatacacacatttattcagatactcccctttttaaagcccttttgttttttgatttatatactctgttttacagatttagctagaaaaaaaatgtcagtgttttggtgcacctttttgaaatgcaaaactaggaaaaggttaaactggatttttttttttaaaaaaaaaaaaaaaaaaaaaaaaaaaaaaaaaaaaaaaaa

SEQ ID NO: 2157 - protein, 495 aa, Homo sapien
MTEPEDVASEVYHGPELECTVGNLLPGTVYRFRVRALNDGGYGPYSDVSEITTAAGPPGQCKAPCISCTPDGCVLVGWESPDSSGADISEYRLEWGEDEESLELIYHGTDTRFEIRDLLPAAQYCCRLQAFNQAGAGPYSELVLCQTPASAPDPVSTLCVLEEEPLDAYPDSPSACLVLNWEEPCNNGSEILAYTIDLGDTSITVGNTTMHVMKDLLPETTYRIRIQAINEIGAGPFSQFIKAKTRPLPPLPPRLECAAAGPQSLKLKWGDSNSKTHAAEDIVYTLQLEDRNKRFISIYRGPSHTYKVQRLTEFTCYSFRIQAASEAGEGPFSETYTFSTTKSVPPTIKAPRVTQLEGNSCEILWETVPSMKGDPVNYILQVLVGRESEYKQVYKGEEATFQISGLQTNTDYRFRVCACRRCLDTSQELSGAFSPSAAFVLQRSEVMLTGDMGSLDDPKMKSMMPTDEQFAAIIVLGFATLSILFAFILQYFLMK

SEQ ID NO: 2158 - DNA, 2835 bp, Homo sapien
gtacagaagcaaaatcaaacctgctatttcagcactcctgtttttaacttggtgtctttagtgcttggattggtgggatgtttcggaatgggcattgtcgccaattttcaggagttagctgtgccagtggttcatgacgggggcgctcttttggcctttgtctgtggtgtcgtgtacacgctcctacagtccatcatctcttacaaatcatgtccccagtggaacagtctctcgacatgccacatacggatggtcatctctgccgtttcttgcgcagctgtcatccccatgattgtctgtgcttcactaatttccataaccaagctggagtggaatccaagagaaaaggattatgtatatcacgtagtgagtgcgatctgtgaatggacagtggcctttggttttattttctacttcctaactttcatccaagatttccagagtgtcaccctaaggatatccacagaaatcaatggtgatatttgaagaaagaagaattcagtctcactcagtgaatgtcgcaggccatttctaaaagtgctacagaggacagacagggttttgaggccaccctgattattgggatgcatctgcagcacatccaggacttgaatttcattacgagttcctaatagttgtatttctaaagatgtgtttcctagagaatgtacagccttatgacactgtagtgatgtttttataattttctaagtagatttttttatattaacaaattcatatacagaaaaaataaggtgttacaaaaaatggagagctcttatttttgtacagattctgtcgtttttttttatttgtgtgagatttatggaaatacactaaatgagtaattcaggttcagtacatttattacaaagtgaaatcaggggatattcatttgtaaattttattcttagtgaatgaactgtataattttttttatcaggagagcacttataaaattcaatttataaagatcatatacccaaatcataaagatttagttgatacattaacactaagatactctgatttttagcgaactaaacaaagtgcttctactgagaggcctttataccaccatgtacagtaactctaagtgaatacggaagaccttggttttgaaattctgccaccttgtttctccctgctcatgaggtcgcaccttttgctcttgctgctaattgcccattcgtagtgggtgtaatgccaggtggaatggtttcaacaagtcaggtgaaaaccatcctttattgttgctggcacaacttgatatatagtctgactcagaactgaagctcacatctcaaattcatttcatgccagtaaatgtggcaaagagaagaaaggcccaagagcgagacaagaagaatggagaagggggcagccaagaagaacttctgggttcagggtactgtttatttgctccttctcttcatgcctgtggctggatgtcccacaacactataagaaatataagtcaagccctttgtgttaagcaagaactacagactccatcttttcacccaaatcatgaatgaccaataaaaagcaagttattccagaggaagaagcagcccttgaaatgttaaggcttaggcttgaaaggtgaagagcaggaattctctctttcaaatcctagagcataaacccatgtgtggccaagtgagatcagccctcaagggcacatgccaagggcagagcagcccatgtagacagcttcggagggcatgggggtgtagggagttcggggtagctcctcattaactatttgttgggtgagtaaaggggtgaggctcagtggcaggtacctctgcaatgacaagctgcctcccctctatgtgtttagcatatgttattagaacatgtccgacacccctaccgctgccatttgggccctttaataaagccaagtagagaaatctggcaataaaaggcaaatgtaagcatgctttctttaagacgcatcataaatggttttctttaagtgaatggaagagtttgacagagatacacctttgtaagaaaacattaagaatgctggctggctgtggtggctcacacctgtattcccagcactttgggaggcctaggcaggaggattgcttgagcctgggacttcgagaccagactgggaaacatggcaaaatcccatctctacaacaaaaatacaaaaattagccaagtgcggtggtgtgcctgtagtcctagttacttgggaggctgaggtgggagaatcacctgagcccaggaggtggaggctgcagtgagccatgccaatgcactccagtctgggcaacagagtgagaccctgtctcaaaaataaataaataaataaatgaataaagagaatgctaatcatttctgggttcactgcgactcactgtagtgctggggatcccccttgtaacactggaactgaaaggcagtgatgaaagctatgtcaagcattcattattctgaagaggaggagaaatgccacatacctttcccatgggacctgtggtggaatgaatccatacttctgcctcacttcgagcagacttttgttctcggcgctcctcacgatggagtttcatgcttcattttcacatctctctgcacaattagattgggagctccttgagggcagagtacgtgccttaatctttatctttgtaatgccacaatgaacagagtgcctcctggtacactgtaggagcttaagaaatactcactgaatgcatgaatgaatgaatgaacaaatgaaggaatgactaaggatgtttgtagtgctataatatagaatgggatttactctgctttaccagttagtttcataataaacaaatagtctgt

SEQ ID NO: 2159 - protein, 132 aa, Homo sapien
MGIVANFQELAVPVVHDGGALLAFVCGVVYTLLQSIISYKSCPQWNSLSTCHIRMVISAVSCAAVIPMIVCASLISITKLEWNPREKDYVYHVVSAICEWTVAFGFIFYFLTFIQDFQSVTLRISTEINGDI

SEQ ID NO: 2160 - DNA, 1387 bp, Homo sapien
ttccggggctagggagcgctttctcccgggaaccgcggctgtgacccaagtggcccggaccagtttggggctgcgtgcggcctgcctcaagcaaccaggtacgtaggtcggcggcccagctcggcgctgcggtgggagccggagggcgacagtcagagccggggtgccagcgggacgcgaccgccagatccacttaggaccccgtcgttctgcgaagcggccacgtctgagtcccggggcctcctcgtgctgcagatgtcgccttaggacctcggccaggataccctctgccatgctcttgtgctgcccgtgatcaccgactggcccttgtaagcaccttcgcagcaggaagcccagagctgcgcctgccctttctgaaggctgtggaagaggttggagtgggcgcatcttagcttgccccatccccatttgaggtctgtcggagctgcccttcagtgtgagcatccacaatgggtaccccagcctcggtggtcagtgagccacccccttggcaggccccgattgaggcccggggccgcaagcaggcctcggccaacatcttccaggacgccgagctgctgcagatccaaggcctgtttcaacgcagcggggaccagctggccgaggaacgggcacagatcatctgggaatgtgcaggggaccaccgtgtggctgaggccctcaagaggctgcgcaggaagaggcccccaaggcagaaacccctgggccactcgctacaccactgcagccgcctcagaatcctggagccccactctgcactggccaacccacagagtgccacagagacagcctccagtgagcagtatctgcactctaggaagaaaagtgccaggatccgccggaactggaggaagtcaggccccacaagctacctccaccagatcagacactgatccagggaaagagccaggaatggcagtgtcttccctcttgccaaaaggcctggggaggtgaaggaagagagactttaggcaagcagcccaaaggggtaaatgaaagcaagaggctgctgccactgacctgctccattcagaacaagactggatgcttctgttgagctctccattatgtgggacccattcctcaccaaaatgaggagagacagtgactgttcctgccacagtccttcccagtctaacactattcctgggctgcatgatattcccctgggagcaaagtgacaggcacttagatgcagcatttcaccactcatgctactaatcatctacctgctactactgtaaaccatggttccagcagcctgttccacacccccacaccatcaggatagcacagggaaactgtagtttaagtggcaaataaaaacatttgcatcaaaaaaaaaaaaaaaaaaaaaaaaaaaaaa

SEQ ID NO: 2161 - protein, 147 aa, Homo sapien
MGTPASVVSEPPPWQAPIEARGRKQASANIFQDAELLQIQGLFQRSGDQLAEERAQIIWECAGDHRVAEALKRLRRKRPPRQKPLGHSLHHCSRLRILEPHSALANPQSATETASSEQYLHSRKKSARIRRNWRKSGPTSYLHQIRH

SEQ ID NO: 2162 - DNA, 1440 bp, Homo sapien
gcgggcggtggggctcacggcctagggaggcgcggaggcatctggcagaggcgggtcgggctgggccagctggggtagagcggaggagcgggtgccggctgaagcggggcggtgggcgcggagcgcgctgggggcaccgacaccacctcaccggcagccgggtgctgagggccgcggtgtgggtgcgcggagcagtcagggcgcaggtgggcagcgcgcacggcctgccagcccggggcgccagaatcctgcgctgcggggccgagaggggcgccgcgcccgccgcagcctggagctttccgcgaacctcggggcgcccatgacggcggcggcgacggctaccgtgctcaaggagggcgtgctggagaagcgcagcggcgggctgctgcagctgtggaagcggaagcgctgcgtcctcaccgaacgcgggctgcagctcttcgaggccaagggcacgggcggccggcccaaggagctcagcttcgcccgcatcaaggccgtggagtgcgtggagagcaccgggcgccacatctacttcacgctggtgaccgaagggggcggcgagatcgacttccgctgccccctggaagatcccggctggaacgcccagatcaccctaggcctggtcaagttcaagaaccagcaggccatccagacagtgcgggcccggcagagcctcgggaccgggaccctcgtgtcctaaaccaccgggcgcaccatctttccttcatgctacccaccacctcagtgctgaggtcaaggcagcttcgttgttccctctggcttgtgggggcacggctgtgctccatgtggcaaggtggaaggcatggacgtgtggaggaggcgctggagctgaaggaatggacgagccctgggaggagggcagaaggctacgcagggctgaggatgaagatgcagcccctggatggtcccagactctcaggacatgcccagctcaggggcttcgagccacaggcctggcctcatatggcatgagggggagctggcataggagccccctccctgctgtggtcctgccctctgtcctgcagactgctcttagccccctggctttgtgccaggcctggagagggcagtcccccatggggtgccgagccaacgcctcaggaatcaggaggccagcctggtaccaaaaggagtacccagggcctggtacccaggcccactccagaatggccttggactcaccttgaaagggggagctgctgggcctaaagcccactcctgggggtctcctgctgcttaggtccttttgggacccccacccatccaggcccttttttgcacacttttcccccaccttatgcatttccccccactgcggtgttcggcctaaggtggtgggggtgagggggggtttggccattagcatttcatgtctttccccaaatgaaatgccctgcaaagggcagtaacccc

SEQ ID NO: 2163 - protein, 127 aa, Homo sapien
MTAAATATVLKEGVLEKRSGGLLQLWKRKRCVLTERGLQLFEAKGTGGRPKELSFARIKAVECVESTGRHIYFTLVTEGGGEIDFRCPLEDPGWNAQITLGLVKFKNQQAIQTVRARQSLGTGTLVS

SEQ ID NO: 2164 - DNA, 1226 bp, Homo sapien
gctgccgcatcccaggctaagcgccgcgccgaaagccgtgcggagattggaggccgcgcgggtccctggtctgggccatgtctggctgtgatgctggggagggagactgttgttcccggagatgcggcgcgcaggacaaggagcatccaagatacctgatcccagaactttgcaaacagttttaccatttaggctgggtcactgggactggaggaggaattagcttgaagcatggcgatgaaatctacattgctccttcaggagtgcaaaaggaacgaattcagcctgaagacatgtttgtttgtgatataaatgaaaaggacataagtggaccttcgccatcgaagaagctaaaaaaaagccagtgtactcctcttttcatgaatgcttacacaatgagaggagcaggtgcagtgattcatacccactctaaagctgctgtgatggccacacttctctttccaggacgggagtttaaaattacacatcaagagatgataaaaggaataaagaaatgtacttccggagggtattatagatatgatgatatgttagtggtacccattattgagaatacacctgaggagaagaccctcaaagatagaatggctcatgcaatgaatgaatacccagactcctgtgcagtactggtcagacgtcatggagtatatgtgtggggggaaacatgggagaaggccaaaaccatgtgtgagtgttatgactatttatttgatattgccgtatcaatgaagaaagtaggacttgatccttcacagctcccagttggagaaaatggaattgtctaagccaaaagaaagtctaattatatacagagataaagctaaacgtaattattatttaaatgaaagctatttttttaaatgaattgaaatttttcatgatgctactaatttgccactaaatactgcaaatggtcaccctgaatctcttctgacattggatgttatttgcttatattcttataattttaaatgagggcacagtgaaatgaaaattttatactctatgtttctgtttatttttaaatccttaacagcaaaatatttgcctttaatttcttttttatatatactctcgagagaattcctcttaatttttaaagatgctggtgataataaaattcattagaaaatttcctcattgtggaatgagcattctcttgttttaatgttggtgtcagaaaataaatatgaaacattaagtcc

SEQ ID NO: 2165 - protein, 242 aa, Homo sapien
MSGCDAGEGDCCSRRCGAQDKEHPRYLIPELCKQFYHLGWVTGTGGGISLKHGDEIYIAPSGVQKERIQPEDMFVCDINEKDISGPSPSKKLKKSQCTPLFMNAYTMRGAGAVIHTHSKAAVMATLLFPGREFKITHQEMIKGIKKCTSGGYYRYDDMLVVPIIENTPEEKTLKDRMAHAMNEYPDSCAVLVRRHGVYVWGETWEKAKTMCECYDYLFDIAVSMKKVGLDPSQLPVGENGIV

SEQ ID NO: 2166 - DNA, 2038 bp, Homo sapien
gcggccgcggccgtgagcctgcccccaactcgccctcagccggctggccggcgcggccatggaggtctacatcccgtcctttcgctatgaagagagcgacctggagcggggatacacggtgtttaagatagaagtgctaatgaatggaagaaaacattttgttgaaaagagatacagcgaatttcatgctttgcacaaaaagcttaagaaatgtataaaaactccagaaatcccttctaaacatgttaggaactgggtccccaaagtcttggaacagcgacgacaaggcttggaaacatacttacaggctgtcattttagaaaatgaagaacttcccaaactgtttcttgatttcctaaatgtgcgacacttgccctctctaccaaaggcagaaagttgtggatcttttgatgaaacagagtctgaagagtcaagcaaactgtcccaccagcctgtgctgctgttcctcagggatccatatgtcttgcctgcagccagcgattttccaaatgtggttattgaaggagtcctccatgggatattttaccctcatctacagcccaggtagaaatcctacatggctaaaagaagcagaagcaagtttcgaagtcacagtcaaggaaatcaatacctaccaatttaacctaaacgctatgatatataacagctctagctagtggtaaagtgcacagtcccagcttaattcagggcagggacatttccattagaatggtgctcttaaaaatagaaactgaaccggggcggtggtcaggctaaggccaagtgtttaagaagtagagtgtagctgccagcgtagaaacccatgaaaaggaggccacaggagattcctgggagcactgggtgtagcaaaacaaagccactctctgcttcagtcgcaccatttgctaattgaaaatcatatcctgaatcatactgagactgatcaactttggtagcttttttgttcagatcttatgacacactactcttctcaccgtgagattttctcagccagtgatagtacattctgaaatgctggcaccaggagacggccacagacacacactgctaaatgtgaagatggaactaaactggaaattaaattatactgacaatattatggcatttttaagatcatggcattttaatttacattagagtggagttgcatcatactcaggggttagcttccaaggtcagtacataggtaaaatgggctattaggatgatccttgaaagccctttagaagggtgccatgttggaaacctgtacatcacaacaagtagcttttcctcctatgttggaaaaaaagactgtttctttgtttgaagaccaagtgaagttgttggtgtttgtttaggggccattttgttaaaaaaaaaaagcacataacttttaacactagaatcagcccgcaagatgcttgccccgctagtggcagatgtgaactgacaaggagtgaagcgcccacccagcggatggacagcacccacctgggtttactcaagggtgtgcattcattttaggtgggatcgccacaggatttcatgttattttccttacggcttccttttcactgacctcatttgttgagttaatgtaagttaaatgtgtctatgatataactccactgtacatcatcctttgagtagtaaaggataaaagcatatatactacctatatgtatgtgctgtatgtgggcatttcattgagatctaattaatagctagcctatttatggttattcgttttagtaagttctgtgggagcaaggtatttaaaatcaaaactaataactacatcatggtttttgattaggatctaaatattcaggttttaagcctgctgcaaacttttaaaatattatgatagattctgtactacatgtgggaaacaagcaagaactaaataatcaaatgttgtcaaccaaaagtaatagttgggtattggagatttttttaaaatgtttttatgttattagctatttggagttaaataaaaacagaacaaggaaaaaaaaaaaaaaaaaaaaaaaaa

SEQ ID NO: 2167 - protein, 169 aa, Homo sapien
MEVYIPSFRYEESDLERGYTVFKIEVLMNGRKHFVEKRYSEFHALHKKLKKCIKTPEIPSKHVRNWVPKVLEQRRQGLETYLQAVILENEELPKLFLDFLNVRHLPSLPKAESCGSFDETESEESSKLSHQPVLLFLRDPYVLPAASDFPNVVIEGVLHGIFYPHLQPR

SEQ ID NO: 2168 - DNA, 895 bp, Homo sapien
gcggccgcgtcgaccggcgcggctggagcgcagcgccgaagggactggcagggctgaagtgtgcgggacagcaagcccccgaatagccccggctgccacctcgcaggacccaaggccacgcgcgccgggcccagctgagccgcctcatgaagccgcccgcggaggacctgtcggacgcgctgtgcgagtttgacgcggtgctggccgacttcgcgtcgcccttccacgagcgccacttccactacgaggagcacctggagcgcatgaagcggcgcagcagcgccagtgtcagcgacagcagcggcttcagcgactcggagagtgcagattcactttataggaacagcttcagcttcagtgatgaaaaactgaattctccaacagactctaccccagctcttctctctgccactgtcactcctcagaaagctaaattaggagacacaaaagagctagaagccttcattgctgatcttgacaaaactttagcaagtatgtgaaacaagaagttctgggtcctttcatcataagggagaagcttcagaaagttccgaggacctgctaaaatcagctactagaatctgctgccagaggggacaaagacgtgcactcaaccttctaccaggccactctcaggctcaccttaaaatcagcccttgatcccatttctgggcaatttagacagtgaaactgactttgtttacctgcttgcagcatattagaacagacgatccatgctaatattgtattttctcttaaaacatagctttcctgtaatttaaagtgcttttatgaaaatatttgtaattaattatatatagttggaaatagcagtaagctttcccattataatatatttttgtatacaaataaaatttgaactgaacctcgtgcc

SEQ ID NO: 2169 - protein, 117 aa, Homo sapien
MKPPAEDLSDALCEFDAVLADFASPFHERHFHYEEHLERMKRRSSASVSDSSGFSDSESADSLYRNSFSFSDEKLNSPTDSTPALLSATVTPQKAKLGDTKELEAFIADLDKTLASM

SEQ ID NO: 2170 - DNA, 1144 bp, Homo sapien
agaagcagtcagcccagggctctcggatgcagggagcctgggcccaaacagcagcttccggagtcggaaggagctgaggaagaagacagactgaaggagcttgcgacttttccgcctcggcaaccggacccagcagcaagcaggacgggcggcgctctgctactggtcccgttaagccagagtagcccaagccctgaagtcactgctcatccggaatggaaatcccgccgaccaactacccagcctccagggcggccttggtggcacagaactacatcaactaccagcaggggaccccgcacagggtgtttgaggtgcagaaggtcaaacaagccagcatggaggatattccaggaagaggacataagtatcgccttaaatttgctgttgaagaaattatacaaaaacaagttaaggtgaactgcacagctgaagtactttacccttcaacgggacaagaaactgcaccagaagtcaacttcacatttgaaggagaaactggaaagaatccagatgaagaagacaacacattttatcaaagacttaagtccatgaaggaaccgctagaagcacaaaatattccagacaattttggaaatgtatctccagaaatgacgctcgttctacatttagcctgggttgcctgtggttatataatatggcaaaattctactgaagacacatggtataaaatggtaaaaattcaaactgtcaagcaagtgcaaagaaatgatgactttattgaattagactacaccattctacttcataatatagcatctcaggagattattccctggcaaatgcaagttctctggcatccacaatacggcactaaagtaaaacataatagccgtctgccaaaggaagtacaactggaataaacaaaaaccctaacactggaagtgtaaacatgtctattgatgtgtatgccaatttcactggcatctagcttatgaggccaaataatcccaaagtgtcactttatataaatgtcttgattacagtatagaactttatagagtccataatacaaagtatcactacataaaaatgtctttaaaacagtaatagtggtatgtatatccaaaataaaaagcttcaatttcagccaaaaaaaaaaaaaaaaaaaaaaaaaaaaaaa

SEQ ID NO: 2171 - protein, 222 aa, Homo sapien
MEIPPTNYPASRAALVAQNYINYQQGTPHRVFEVQKVKQASMEDIPGRGHKYRLKFAVEEIIQKQVKVNCTAEVLYPSTGQETAPEVNFTFEGETGKNPDEEDNTFYQRLKSMKEPLEAQNIPDNFGNVSPEMTLVLHLAWVACGYIIWQNSTEDTWYKMVKIQTVKQVQRNDDFIELDYTILLHNIASQEIIPWQMQVLWHPQYGTKVKHNSRLPKEVQLE

SEQ ID NO: 2172 - DNA, 2076 bp, Homo sapien
gctggagccggcgcggaggagcgggcggccgcggctgtgccctctcctactcctcaccgcgcgcgcgcggggaaccagtagccgcggctgcttcggttgccgcggtcggtggtcgttatggattctccatgggacgagttggctctggccttctcccgcacgtccatgtttcccttttttgacatcgcgcactatctagtgtcagtgatggcggtgaaacgtcagccgggagcagctgcattggcatggaagaatcctatttcaagctggtttactgctatgctccactgttttggtggaggaattttatcctgtctactgcttgcagagcctccattgaagtttcttgcaaaccacactaacatattactggcatcttcaatctggtatattacatttttttgcccgcatgacctagtttcccagggctattcatatctacctgttcaactactggcttcgggaatgaaggaagtgaccagaacttggaaaatagtaggtggagtcacacatgctaatagctattacaaaaatggctggatagtcatgatagctattggatgggcccgaggtgcaggtggtaccattataacgaattttgagaggttggtaaaaggagattggaaaccagaaggtgatgaatggctgaagatgtcataccctgccaaggtaaccctgctggggtcagttatcttcacattccagcacacccagcatctggcaatatcaaagcataatcttatgttcctttataccatctttattgtggccacaaagataaccatgatgactacacagacttctactatgacatttgctccttttgaggatacattgagttggatgctatttggctggcagcagccgttttcatcatgtgagaagaaaagtgaagcaaagtcaccttccaatggcgttgggtcattggcctcaaagccggtagatgttgcctcagataatgttaaaaagaaacatactaagaagaatgaataaatttacgtgatgagctctacaaggccaaaaattttttttcttatctacctgttatattgtgctaatttttctatgtatgtgatgtgaaatgaagactatatatatggaatggaggtgacagaaagaaagaaattctttgtttgagggagacttcccctttctggattgtatttgtagagtgttacgagtgtatcatgtgattatgctttaccggtataagagattctgttgtgattatttgaatagttttatattaataaaagaagacaaaattttttaaatgttagaaaaagcagatctgtcattgcaaagtaacaaaaattttaagcttttaaaaatgtagatttttcatatttttaaaatttgaatctatttgagctttagttcagcagaattaaatttttacttgacattatcattaaaattgctaggtatggagaacaattcctattttattttgaacactgagaagagtaaacttttcctaaaacactttatattataaatgaaaataaattgctagtttatattttagatataaacatcatattttttattaatacctacatcaaatggaaaatatctgaaattttttttccatagcaggtattttctactagaagtagttttactacttttcatttagaacagagtatgagtcttaatctgaagtctttttcatgcccttgttttaaaaaaactactttttttggcctcaaaaaaatcaagggtgtaatttttaataaattgttaatcctatgttttgtaattttcattttaggagcttgacttatttttttctctctcataaaaacacatttgttttaattgtaggagaaattttctcagcattttgcatgttctttctaatctttgttggtctgaatatattggtagtaattactgtaattattcaacaaaaagcatatccgttcaaaaatttttccactatgtcttttttctagtggctactgttttagttttctagttgaatatctctgacaagctttcgtatggttttgttatatcttcatctacatgtaatgtgttattaattttattaaatgaaaactaatcaccttc

SEQ ID NO: 2173 - protein, 291 aa, Homo sapien
MDSPWDELALAFSRTSMFPFFDIAHYLVSVMAVKRQPGAAALAWKNPISSWFTAMLHCFGGGILSCLLLAEPPLKFLANHTNILLASSIWYITFFCPHDLVSQGYSYLPVQLLASGMKEVTRTWKIVGGVTHANSYYKNGWIVMIAIGWARGAGGTIITNFERLVKGDWKPEGDEWLKMSYPAKVTLLGSVIFTFQHTQHLAISKHNLMFLYTIFIVATKITMMTTQTSTMTFAPFEDTLSWMLFGWQQPFSSCEKKSEAKSPSNGVGSLASKPVDVASDNVKKKHTKKNE

SEQ ID NO: 2174 - DNA, 2183 bp, Homo sapien
agggggccgagcggcgggccgggccgggccgggcagggccggggcgtgggccggcaggaagatggcgaacgtggggctgcagttccaggcgagcgcgggggactcggacccacagagccggcccctgctgctgctcgggcagctgcaccacctgcaccgcgtgccctggagccacgtccgcgggaagctgcagccccgggtcaccgaggagctctggcaggctgccctgagcacgctcaaccccaaccccacggacagctgtcccctctacctgaactacgccaccgtggctgccctgccctgcagggtgagccggcacaacagcccctcggccgcccacttcatcacgcggctggtgcggacctgcctgccgcccggagcgcatcgctgcattgtgatggtctgcgagcagccggaggtctttgcttccgcctgtgccctggcccgggccttcccgctgttcacccaccgctcaggtgcctctcggcgcttggagaagaagacggtcaccgtggagtttttcctggtgggacaagacaacgggccggtggaggtgtccacattgcagtgcttagcgaatgccacagacggcgtgcggctagcagcccgcatcgtggacacaccctgcaatgagatgaacaccgacaccttcctcgaggagattaacaaagttggaaaggagctggggatcatcccaaccatcatccgggatgaggaactgaagacgagaggatttggaggaatctatggggttggcaaagccgccctgcatcccccagccctggccgtcctcagccacaccccagatggagccacgcagaccatcgcctgggtgggcaaaggcatcgtctatgacactggaggcctcagcatcaaagggaagactaccatgccggggatgaagcgagactgcgggggtgctgcggccgtcctgggggccttcagagccgcaatcaagcagggtttcaaagacaacctccacgctgtgttctgcttggctgagaactcggtggggcccaatgcgacaaggccagatgacatccacctgctgtactcagggaagacggtggaaatcaacaacacggatgccgagggcaggctggtgctggcagatggcgtgtcctatgcttgcaaggacctgggggccgacatcatcctggacatggccaccctgaccggggctcagggcattgccacagggaagtaccacgccgcggtgctcaccaacagcgctgagtgggaggccgcctgtgtgaaggcgggcaggaagtgtggggacctggtgcacccgctggtctactgccccgagctgcacttcagcgagttcacctcagctgtggcggacatgaagaactcagtggcggaccgagacaacagccccagctcctgtgctggcctcttcatcgcctcacacatcggcttcgactggcccggagtctgggtccacctggacattgctgcaccggtgcatgctggtgagcgagccacaggcttcggtgtggccctcctgctggcgctcttcggccgtgcctctgaggaccctctgctgaacctggtgtccccactgggctgtgaggtggatgtcgaggagggggacctggggagggactccaagagacgcaggcttgtgtgagcctcctgcctcggccctgacaaacggggatcttttacctcactttgcactgattaattttaagcaattgaaagattgcccttcatatgggttttggtttgtctttctggtcgtcagcgtggtggtggaaacagctgaagttttaggagacagcttagggtttggtgcgggccacggggaggggaccgggaagcgctggggcttgtttctgtttgttacttacaggactgagacatcttctgtaaactgctacccctggggccttctgcaccccggggtgaggcctcctgcctgcctggtgccctgtcccagccccaggtcctgtgcagggcacctgcgtggctgacagccaggctcttactccagccggggctgccagcgcatccagccagcccagccctgtgaaagatggagctgacttgctgcaggggacctgatttatagggcaagagaagtcacactccggcctctcagaattcacttgaggttcaattaaatacagtcacaccgccccctcaaaaaaaaaaaaaaaaaaaaaaaaaaaaaaaaa

SEQ ID NO: 2175 - protein, 411 aa, Homo sapien
MVCEQPEVFASACALARAFPLFTHRSGASRRLEKKTVTVEFFLVGQDNGPVEVSTLQCLANATDGVRLAARIVDTPCNEMNTDTFLEEINKVGKELGIIPTIIRDEELKTRGFGGIYGVGKAALHPPALAVLSHTPDGATQTIAWVGKGIVYDTGGLSIKGKTTMPGMKRDCGGAAAVLGAFRAAIKQGFKDNLHAVFCLAENSVGPNATRPDDIHLLYSGKTVEINNTDAEGRLVLADGVSYACKDLGADIILDMATLTGAQGIATGKYHAAVLTNSAEWEAACVKAGRKCGDLVHPLVYCPELHFSEFTSAVADMKNSVADRDNSPSSCAGLFIASHIGFDWPGVWVHLDIAAPVHAGERATGFGVALLLALFGRASEDPLLNLVSPLGCEVDVEEGDLGRDSKRRRLV

SEQ ID NO: 2176 - DNA, 2571 bp, Homo sapien
tacttgcgtcatggacagctcattgtaaatgatggcattaatttattgggtgtgttagaagaagcaagattttttggtattgactcattgattgaacacctagaagtggcaataaagaattctcaaccaccggaggatcattcaccaatatcccgaaaggaatttgtccgatttttgctagcaactccaaccaagtcagaactgcgatgccagggtttgaacttcagtggtgctgatctttctcgtttggaccttcgatacattaacttcaaaatggccaatttaagccgctgtaatcttgcacatgcaaatctttgctgtgcaaatcttgaacgagctgatctctctggatcagtgcttgactgtgcgaatctccagggagtcaagatgctctgttctaatgcagaaggagcatccctgaaactgtgtaattttgaggatccttctggtcttaaagccaatttagaaggtgctaatctgaaaggtgtggatatggaaggaagtcagatgacaggaattaacctgagagtggctaccttaaaaaatgcaaagttgaagaactgtaacctcagaggagcaactctggcaggaactgatttagagaattgtgatctgtctgggtgtgatcttcaagaagccaacctgagagggtccaacgtgaagggagctatatttgaagagatgctgacaccactacacatgtcacaaagtgtcagatgagaattttaggggctggaggaagatgtaaaagatgaaaatgttttccttatcacttttctttctccacccactcagttgtctagaagaaataacactgtaaggaaatttaaaaaaaaaacatttagaggattatgcttgttttgagtggtgcataagggaaaaaactgactttttttccatattctgatttttaacagaaaagcactcatttaatagatgtagggaaactagatattgctgccttttgaatggggtaggggggtttacctggttttatgaccaggcatagtatctattatatttgcttttaaataggcatgatgtggaaataccatcttggtttgagatgcatttgaggattttaatttatggaaagcacaacatatgcaattatatttattgaattcctagatgcagtatggatatttaaattgttaaaactttatgaaaacttggaaaaggttgttcaggtttataaatagctttagtgatgcctcccctctttaaatacctgtcacaccgtatgaatatggtgagatcagactccctaagactcttttcaggttcatttttataatgtttactttttaggacagaacagtagctaaattaaagtaatatccagttcttactgattgagacagagtggaaagaaagacatcattgtacatcactgtcattccaaaggtacagtgtaactctggatggaggaataacttacctatcactacaacacttacaaatgagaatttctcagaatttcattctaggcaagttccactcaacaccagatcaagcaattctatctatttacactattagcctagttttctcatacagtcatcacaagcataggaagatacttcaaaaccaaaaaaaccaaggtgcatcattaatattcatttaattcaaatgccaaatagtttacatagggccagcttagaaatagatactaaatccagagctactgcaatcaaagcttatatgagtgaatatggtagagttgcctgctaaaaggcaatgtaatataattgcagctagaaccctacagtggggaatgaggaattttaaacacacatttgattgcagccaccaaaaaaaatagacgtaaaaataaaggcatttggctggtccaagatgtaattatcaatcagtcagcacctgtgattcttttacttatttttttgtggtttttttttttaaacaaattttagcccaattttcttgagtcattctctctctgcagcagcagaggaagggcctgtacctccctaccaatgacttggtgtccttattttctaccccaagagcagggatattagctgtgtccaaatgggttctgaattctacagactcatcaacatgaggcaaggaatcattgaaaaccacctgtgtctcctttgggagaatgacatatctttagtatttacgtagcttattcttctatatctacatatgcaaagctttccttaacagtaaagggtacatatgcatagtgggaggagatcagacctttacaagtgaaggaaagcaacttcagaaatgaattattttctttgctttattatttttaccaagacagagaagtattgtattgagagataatctattttcataatcaatatgtgcctaaattatatttaaatcatttcactctgtactatattttcaggaattacagaatgtggtattcattcacttaaaggtacctctgtagaaataacctaaaactgcagaaggatctgaaagatctaaacatggtgtgcttagaaactgcagattttagatctaatgtatactgcattaataaatgatataaagtgtttgttgaaaaaaaaaaaaaaaaaaaaa

SEQ ID NO: 2177 - protein, 148 aa, Homo sapien
MANLSRCNLAHANLCCANLERADLSGSVLDCANLQGVKMLCSNAEGASLKLCNFEDPSGLKANLEGANLKGVDMEGSQMTGINLRVATLKNAKLKNCNLRGATLAGTDLENCDLSGCDLQEANLRGSNVKGAIFEEMLTPLHMSQSVR

SEQ ID NO: 2178 - DNA, 1520 bp, Homo sapien
ggcacgaggccgagcctagtgcctcccacgcccggcggccgcgagccggggtccgcgagggcggagtggggcgcggcagccaggaacccgactacgaatcccagggtgcgggcgggcggagcgaggagggacgctgggcctgcccggtgcgcacgggggcggggaccggcaaggcgggaccatttcccggcataggctccggtgcccctgcccggctcccgccgggaagttctaggccgccgcacagaaagccctgccctccacgccgggtctctggagcgccctgggttgcccggccggtccctgccgctgacttgttgacactgcgagcactcagtccctcccgcgcgcctcctccccgcccgccccgccgctcctcctccctgtaacatgccatagtgcgcctgcgaccacacggccggggcgctagcgttcgccttcagccaccatggggaatgggatgaacaagatcctgcccggcctgtacatcggcaacttcaaagatgccagagacgcggaacaattgagcaagaacaaggtgacacatattctgtctgtccatgatagtgccaggcctatgttggagggagttaaatacctgtgcatcccagcagcggattcaccatctcaaaacctgacaagacatttcaaagaaagtattaaattcattcacgagtgccggctccgcggtgagagctgccttgtacactgcctggccggggtctccaggagcgtgacactggtgatcgcatacatcatgaccgtcactgactttggctgggaggatgccctgcacaccgtgcgtgctgggagatcctgtgccaaccccaacgtgggcttccagagacagctccaggagtttgagaagcatgaggtccatcagtatcggcagtggctgaaggaagaatatggagagagccctttgcaggatgcagaagaagccaaaaacattctggccgctccaggaattctgaagttctgggcctttctcagaagactgtaatgtacctgaagtttctgaaatattgcaaacccacagagtttaggctggtgctgccaaaaagaaaagcaacatagagtttaagtatccagtagtgatttgtaaacttgtttttcatttgaagctgaatatatacgtagtcatgtttatgttgagaactaaggatattctttagcaagagaaaatattttccccttatccccactgctgtggaggtttctgtacctcgcttggatgcctgtaaggatcccgggagccttgccgcactgccttgtgggtggcttggcgctcgtgattgcttcctgtgaacgcctcccaaggacgagcccagtgtagttgtgtggcgtgaactctgcccgtgtgttctcaaattccccagcttgggaaatagcccttggtgtgggttttatctctggtttgtgttctccgtggtggaattgaccgaaagctctatgttttcgttaataaagggcaacttagccaagtttaaaaaaaaaaaaaaaaaaaaaaaaaaaaaaaa

SEQ ID NO: 2179 - protein, 184 aa, Homo sapien
MGNGMNKILPGLYIGNFKDARDAEQLSKNKVTHILSVHDSARPMLEGVKYLCIPAADSPSQNLTRHFKESIKFIHECRLRGESCLVHCLAGVSRSVTLVIAYIMTVTDFGWEDALHTVRAGRSCANPNVGFQRQLQEFEKHEVHQYRQWLKEEYGESPLQDAEEAKNILAAPGILKFWAFLRRL

SEQ ID NO: 2180 - DNA, 2358 bp, Homo sapien
cccagcaggcagtgcagcctagagacgctgacaaaggagcggaggagcagtcgcagctgctttccgaggaagccggtgttgccgagattgccaaaatgctttggagtttttaactgaatctaagaaaagtccaaaatagatttgagactgtaaaaacagaaactgcagcaagggggattcagtgccaatgcatcaacaaaaaagacaaccagagttagtggaaggaaatcttcctgttttcgtgttccccacggagctcatattttatgcagatgatcagtcaacacataagcaagtgttgacactgtacaatccctatgagtttgccttaaagttcaaagttttgtgtactactccaaataagtatgttgtcgttgatgctgcaggtgcagtaaagcctcagtgttgtgtggatattgtgattcgtcatcgagatgttcgatcctgtcactatggtgtaatagacaaattccgtctccaagtttccgagcaaagccaaaggaaggctttgggaagaaaagaggttgttgctactcttctcccatcagcaaaagaacaacaaaaggaagaagaggaaaaaagattaaaggaacatttaactgaaagtttattttttgagcagtcgtttcaaccagaaaacagagctgtatcctcaggacctagtttactaactgtcttcctgggagtggtgtgcattgcagccctgatgctgcctacactgggggatgtggaatcgctggtgcctctctacctccacttaagtgtgaatcaaaaattagtggctgcttatatcttaggtcttatcacaatggccatacttagaacatgagcaaggatttcaattgacttctgaagtaaatctgtcttgaaaatatgaatgtggactgccttttatctctatttcactccattaacatgcaacaaactattgaatgatttcaaataattgcaaatgtataatatatattttaaattataatttaatttgaaggactgcagaacattattttacagacagcaaggatgcttctgagtgacacctaggaaattatttgaagaaattctttttatatctatacctgttgtgtaagaaactttaaaacatttgttattttctcacctttttttctaattcactttgattgctaggggtcatgtatgcttcgaagttacaggactaaaagagcaaactgaccggcctaaaactaaaatgacatttattccctagctacaaacatcagcgttattatgttaattataccttgccctctatcattataaatggttgccatggtgtttctaaaaataagtgttttaccattaatgtgtagagggcaaacaaagcataaagtactaagggatcatgcttatcctagggtctcacagaagagaggacatatttaattaatcttgtgaattacagaacaggttgtggtccagacaccaagaatcataggggtttttttttaaaaaacctaatagaagtagggtgacctctctctttggtctaagagttctaaaggaaggtaggcatctgtttaattagttggttcaccctggctttacctctggttaatgctttgtgttaataggaaggaaaaatcactttatcttttcttccaagcccctccctgcctgacttacccagactgggattaccagataccaggtgatttatgtggagatgatttttcacctttaaactctaagccaagtgtaagaaactcttgatagctatgtctattttatatcagtcactgagacttttttttaagtttttatttattattaagacaactttgccaaaaaagtcccctaagcacaactatttacatttctttatagcctcttctgatctctaacacatatgcagttttaactgttattttcatagtaactgatcttttgtctaaggatttttacctgaaagcacaatgtattgagtctcttgaaaatcatctttcagatctttttacagaatgaacttatgcactgctactgtagtattctcaaggaatatatgtaaacacaaatgtatgcctgaggttggtttttgcagaaaacagtctctgcttctaaaaacttctatgtctagtcttccataggaaatcctcactgtttaaccatgtgaggagcctaagtcattaaacggatcatgtctgtacattgtgtaatgaatgaaaagcacataaatgtaatctactttgaactttgtaaaaatgatgtgtggaggctattcttgtttctccatctcaagtcctgtgtgtgcacgtgtgtgcaagtgcacatgtgtgtgtgtaataacacattgtaaagaacagaaattactttaaaaaataaacagaaatggagacctga

SEQ ID NO: 2181 - protein, 213 aa, Homo sapien
MHQQKRQPELVEGNLPVFVFPTELIFYADDQSTHKQVLTLYNPYEFALKFKVLCTTPNKYVVVDAAGAVKPQCCVDIVIRHRDVRSCHYGVIDKFRLQVSEQSQRKALGRKEVVATLLPSAKEQQKEEEEKRLKEHLTESLFFEQSFQPENRAVSSGPSLLTVFLGVVCIAALMLPTLGDVESLVPLYLHLSVNQKLVAAYILGLITMAILRT

SEQ ID NO: 2182 - DNA, 885 bp, Homo sapien
gacttttcccacacactggattgtgaggctcttcttaaaagtataatggcatcttgtgaatcctataagcagtctttatgtctcttaacattcacacctactttttaaaaacaaatattattactatttttattattgtttgtcctttataaattttcttaaagattaagaaaatttaagaccccattgagttactgtaatgcaattcaactttgagttatcttttaaatatgtcttgtatagttcatattcatggctgaaacttgaccacactattgctgattgtatggttttcacctggacaccgtgtagaatgcttgattacttgtactcttcttatgctaatatgctctgggctggagaaatgaaatcctcaagccatcaggatttgctatttaagtggcttgacaactgggccaccaaagaacttgaacttcaccttttaggatttgagctgttctggaacacattgctgcactttggaaagtcaaaatcaagtgccagtggcgccctttccatagagaatttgcccagctttgctttaaaagatgtcttgttttttatatacacataatcaataggtccaatctgctctcaaggccttggtcctggtgggattccttcaccaattactttaattaaaaatggctgcaactgtaagaacccttgtctgatatatttgcaactatgctcccatttacaaatgtaccttctaatgctcagttgccaggttccaatgcaaaggtggcgtggactccctttgtgtgggtggggtttgtgggtagtggtgaaggaccgatatcagaaaaatgccttcaagtgtactaatttattaataaacattaggtgtttgttaaaaaaaaaaaaaaaaaaaaaaaaaaaaaa

SEQ ID NO: 2183 - protein, 124 aa, Homo sapien
MQFNFELSFKYVLYSSYSWLKLDHTIADCMVFTWTPCRMLDYLYSSYANMLWAGEMKSSSHQDLLFKWLDNWATKELELHLLGFELFWNTLLHFGKSKSSASGALSIENLPSFALKDVLFFIYT

SEQ ID NO: 2184 - DNA, 1163 bp, Homo sapien
agatccagcaggtgcgcgaaaccgcggcgcgccgccctccgccgttatatgaggccccgctccggccccacgcggaacccgcggctccgagccttcgccggcgtcccgacccgaggccggacccgaggccagtcccgccgctgcgcagccgaagccagtgcggggcctgagagggacgcgcgccccggggcccccgccgcgggcaccatgggcgctgcccactccgcgtctgaggaggtgcgggagctcgagggcaagaccggcttctcatcggatcagatcgagcagctccatcggagatttaagcagctgagtggagatcagcctaccattcgcaaggagaacttcaacaatgtcccggacctggagctcaaccccatccgatccaaaattgttcgtgccttcttcgacaacaggaacctgcgcaagggacccagtggcctggctgatgagatcaatttcgaggacttcctgaccatcatgtcctacttccggcccatcgacaccaccatggacgaggaacaggtggagctgtcccggaaggagaagctgagatttctgttccacatgtacgactcggacagcgacggccgcatcactctggaagaatatcgaaatgtaaagtggtcgaggagctgctgtcgggaaaccctcacatctagaaggagtccgctcgctccatcgccgacggggccatgatggaggcggccagcgtgtgcatggggcagatggagcctgatcaggtgtacgaggggatcaccttcgaggacttcctgaagatctggcaggggatcgacattgagaccaagatgcacgtccgcttccttaacatggaaaccatggccctctgccactgacccaccgccacctccgcggagagactgcactttgcaatggggccgcctccccgcgtagctggagcagcccaggcccggcggacagcctcttcctgcagcgccggtacatagccaaggctcgtctgcgcaccttgtgtcttgtagggtatggtatgtgggacttcgctgtttttatctccaataaaaaaaaaaaaaaaaggtttgttaattaaaaaaaaaaaaaaaaagaaaaaaaaaaaaaaaaaaaaaaaaaaaaaagaaaaaaaaaaaaaaaaaaaaaaaaaaaaaaaaaaaaaaaaaaaaaaa

SEQ ID NO: 2185 - protein, 216 aa, Homo sapien
MRPRSGPTRNPRLRAFAGVPTRGRTRGQSRRCAAEASAGPERDARPGAPAAGTMGAAHSASEEVRELEGKTGFSSDQIEQLHRRFKQLSGDQPTIRKENFNNVPDLELNPIRSKIVRAFFDNRNLRKGPSGLADEINFEDFLTIMSYFRPIDTTMDEEQVELSRKEKLRFLFHMYDSDSDGRITLEEYRNVKWSRSCCRETLTSRRSPLAPSPTGP

SEQ ID NO: 2186 - DNA, 2805 bp, Homo sapien
aaacccaaagcggccgccgtaggcgaaggtgaagatggctgcctctgcctttgctggtgcagtgagagcagcttcaggaatcctacggcccctgaatattttggcatcttcaacctaccgcaactgtgtcaagaatgcctctcttatttctgcattgtccactggacgttttagtcatattcagacaccagttgtttcctccactcccagacttaccacatctgagagaaacctgacatgtgggcatacctcagtgatccttaatagaatggcccccgtgcttccaagtgtcctgaagctgccagtcagatctctaacatacttcagtgcaagaaaaggcaagagaaagaccgtgaaagctgtcatcgataggtttcttcgacttcattgtggcctttgggtgaggagaaaggctggctataagaaaaaattatggaaaaagacacctgcaaggaagaagcgattgagggaatttgtattctgcaataaaacccagagtaaactcttagataaaatgacgacgtccttctggaagaggcgaaactggtacgttgatgatccttatcagaagtatcatgatcgaacaaacctgaaagtatagatcagaagtttcacttgtttctcagttattggatatgtatctttgtgtacatatctttgcaaaaatggataagtacaaaacttgatgtaaattgtaccaatgaatacgtaaacatacagtgacaacattaaacttagaaaagttttaaaacttaatggatcagactttgccagatttggttagggaaacagaaatttagaatggtgcattatttttaacaaatggtattggcttaactagttgtttcagttatgctcttttagttgcaaggaatctcaagtgggacaaacataaaaagactcaaaagctacaagttagctcaagcaatgtgacattatttcaaggatatgtgccagggaattcaggaaccacctcaccaaccccatctcccactcagaaatcacctcccagcctcaggaagagtagaaattgggtggtgctcctcagcaggggaaggtggatgtttaggcttgggctctgcatgcatgtgacttgcttctttttgcattgttaactccattctctctattcaccaacttctctacacagcttttgcatacttacagtttctgttcctttgtaataactttaacttgcacctttgaggttcttttctacatgatgaccttcagctcctgctgctagtctccaattgccaagggaatttaactgggccagactacctttttatactaggtctggttgggtcattgtctagagtagggattggctgtccttaagtcaggagcccgctttgtattagcaggtttgcatgcagcaaaaaaacagttatgtgagcagtttcacttggaggttcacatggggtggcagcacacttaacatctaacacaccaggttcattgtgttcataacacttgtcatttactgtaacaacattttttcataggagagtaaatagcccttcagcatgctcattcatgaaacagaagaggctgtacaagtgaagacaagggctttttatgcaagttttgaaagataggtatttattttttctagagacaggagttttgctctgttgcccaggctggagtgcagtggtgcaatcatagctcattgaagcctcgcactcctgggctcaagtggtcctcctgcctcagcttactgagtaaggatatgtatttcttaaaagttagtttatccacttcagatttcatgttttcatttgtaaggataaacttttcccacaaattttcaacaatcattgtagaaactaagggggagaaagtaatctcagttgttttagaaacgaaaaagttaagcattgtttacttgaagtgggcagggaagcagcactgagtaaagttcaattgagtggttacagtctagggcagtggttcccaactctccgatcagaatcatctgggaagcattttcaaacagcaaagtactttgaaaaccattattaaatagaattatgcatgaattactgtttcagatcctttaatgtggtagttggtaataataagatgaaattcctctgttgttagtaaaattatgaaattgaagttctgcagcatgtcaggccaggattattagggagattcctcgaaactagtgtgtgtttattaaaaggagaaaggataacaatagaatgttctaaaaccagaagtccaagtgcgtgtctacttatgggaccaataaataaagaacagacatttgatttgaggtgaggtaaaagcctgaaacatggaatggcattctgttttgatggattttcatttcttcgcacttctgagacggcaaagccaaccacttagaagccttccacatctttgtcacctgcctggctcctgctctctgatgtacctctgggtagtgagatggaaatggtgcctgcagaagttggggagaaggatacttttgcacagcctccatgatgtctttattgcaaatatggatgacaagggtctctgttacaggggcctcagagcaccttcgtttctcctctagaccagggacaggtgtagagataaggactggcaaccagagcctcagcatccaaagatggactgaagtgggatggctgacaggcacataacttacgggaaagggaatttcatacatacgatttttgttttgtgggtaggagggcttatcatcaacactgattttataatctgacaataaatgtctttcattaaagagtttacctaaatgaaaaaaaaaaaaaaaaaaaaaaaaaa

SEQ ID NO: 2187 - protein, 122 aa, Homo sapien [sequence omitted]

SEQ ID NO: 2188 - DNA, 3065 bp, Homo sapien
tagttattaaagttcctatgcagctccgcctccgtccggcctcatttcctcaaaaaatccctgctttccccgctcgccacgccctcctgctacccggctttaaagctagtgaggcacagcctgcggggaacgtagctagctgcaagcagaggccggcatgaccaccgagcagcgacgcagcctgcaagccttccaggattatatccggaagaccctggaccctacctacatcctgagctacatggccccctggtttagggaggaagaggtgcagtatattcaggctgagaaaaacaacaagggcccaatggaggctgccacactttttctcaagttcctgttggagctccaggaggaaggctggttccgtggctttttggatgccctagaccatgcaggttattctggactttatgaagccattgaaagttgggatttcaaaaaaattgaaaagttggaggagtatagattacttttaaaacgtttacaaccagaatttaaaaccagaattatcccaaccgatatcatttctgatctgtctgaatgtttaattaatcaggaatgtgaagaaattctacagatttgctctactaaggggatgatggcaggtgcagagaaattggtggaatgccttctcagatcagacaaggaaaactggcccaaaactttgaaacttgctttggagaaagaaaggaacaagttcagtgaactgtggattgtagagaaaggtataaaagatgttgaaacagaagatcttgaggataagatggaaacttctgacatacagattttctaccaagaagatccagaatgccagaatcttagtgagaattcatgtccaccttcagaagtgtctgatacaaacttgtacagcccatttaaaccaagaaattaccaattagagcttgctttgcctgctatgaaaggaaaaaacacaataatatgtgctcctacaggttgtggaaaaacctttgtttcactgcttatatgtgaacatcatcttaaaaaattcccacaaggacaaaaggggaaagttgtcttttttgcgaatcagatcccagtgtatgaacagcagaaatctgtattctcaaaatactttgaaagacatgggtatagagttacaggcatttctggagcaacagctgagaatgtcccagtggaacagattgttgagaacaatgacatcatcattttaactccacagattcttgtgaacaaccttaaaaagggaacgattccatcactatccatctttactttgatgatatttgatgaatgccacaacactagtaaacaacacccgtacaatatgatcatgtttaattatctagatcagaaacttggaggatcttcaggcccactgccccaggtcattgggctgactgcctcggttggtgttggggatgccaaaaacacagatgaagccttggattatatctgcaagctgtgtgcttctcttgatgcgtcagtgatagcaacagtcaaacacaatctggaggaactggagcaagttgtttataagccccagaagtttttcaggaaagtggaatcacggattagcgacaaatttaaatacatcatagctcagctgatgagggacacagagagtctggcaaagagaatctgcaaagacctcgaaaacttatctcaaattcaaaatagggaatttggaacacagaaatatgaacaatggattgttacagttcagaaagcatgcatggtgttccagatgccagacaaagatgaagagagcaggatttgtaaagccctgtttttatacacttcacatttgcggaaatataatgatgccctcattatcagtgagcatgcacgaatgaaagatgctctggattacttgaaagacttcttcagcaatgtccgagcagcaggattcgaagagattgagcaagatcttactcagagatttgaagaaaagctgcaggaactagaaagtgtttccagggatcccagcaatgagaatcctaaacttgaagacctctgcttcatcttacaagaagagtaccacttaaacccagagacaataacaattctctttgtgaaaaccagagcacttgtggacgctttaaaaaattggattgaaggaaatcctaaactcagttttctaaaacctggcatattgactggacgtggcaaaacaaatcagaacacaggaatgaccctcccggcacagaagtgtatattggatgcattcaaagccagtggagatcacaatattctgattgccacctcagttgctgatgaaggcattgacattgcacagtgcaatcttgtcatcctttatgagtatgtgggcaatgtcatcaaaatgatccaaaccagaggcagaggaagagcaagaggtagcaagtgcttccttctgactagtaatgctggtgtaattgaaaaagaacaaataaacatgtacaaagaaaaaatgatgaatgactctattttacgccttcagacatgggacgaagcagtatttagggaaaagattctgcatatacagactcatgaaaaattcatcagagatagtcaagaaaaaccaaaacctgtccctgataaggaaaataaaaaactgctctgcagaaagtgcaaagccttggcatgttacacagctgacgtaagagtgatagaggaatgccattacactgtgcttggagatgcttttaaggaatgctttgtgagtagaccacatcccaagccaaagcagttttcaagttttgaaaaaagagcaaagatattctgtgcccgacagaactgcagccatgactggggaatccatgtgaagtacaagacatttgagattccagttataaaaattgaaagttttgtggtggaggatattgcaactggagttcagacactgtactcgaagtggaaggactttcattttgagaagataccatttgatccagcagaaatgtccaaatgatatcaggtcctcaatcttcagctacagggaatgagtaactttgagtggagaagaaacaaacatagtgggtataatcatggatcgcttgtacccctgtgaaaatatattttttaaaaataaaaaaaaaaaa

SEQ ID NO: 2189 - protein, 925 aa, Homo sapien [sequence omitted]

SEQ ID NO: 2190 - DNA, 2743 bp, Homo sapien
ggggggcacaggggagactaaaaaggccagggaagttggcctgccggaagttcccagggagaaggcagcgcgttgtacccgagttacctgtagtcaaccacagtctgaaaatattaaggtattttaagacagaaagagagagaggagagaaaccgcattcacaaaaaagaaatcctctttttagaacatctcttggtggtaccatcagaaatgtcttccttaagtggaaaagtccaaaccgttttgggccttgtagagccaagcaaactgggccgtaccctgacccatgaacacctggccatgacctttgactgctgttactgtccacctcccccgtgccaggaagctatttccaaagaacctatcgtgatgaaaaatttatattggattcagaaaaacgcctattcccataaagaaaaccttcaattaaatcaggagacagaagccataaaggaagaactgttgtattttaaagctaatggtggaggggctttggtggaaaacacaaccactgggattagccgagacacacagacgttgaagaggcttgcagaagagactggcgtccatatcatatctggagccgggttttatgtggatgcaactcactcctcagagaccagggccatgtcagtggagcagcttaccgatgtccttatgaatgaaattctccatggagctgatggaaccagtatcaagtgtggcattattggagaaattggttgctcctggcctttgactgagagtgaaagaaaggttctccaggccacagctcatgcccaggctcagcttggttgtcctgttattatccatcctggacggagctccagggcaccatttcagattatccgaatattgcaagaagcaggcgcagacatctccaaaacagtcatgtcacacctggataggactattcttgataagaaagagctcttggagtttgctcaacttggctgctacttggaatatgatctctttggtactgaactacttcattaccaactcggcccagatattgacatgcctgatgataacaaaagaattagaagggtgcgtctcctggtggaagagggctgtgaagatcgaattctggtagcacatgacatacatacgaaaacccggctgatgaaatatggaggtcacggctattctcatatactcaccaatgttgttcctaaaatgttgctgagaggcataactgagaatgtgcttgataagattctaatagagaaccctaagcaatggctaactttcaaataggatggttgcttatgaattcacaccttgagtataaaacttgcagagaacattcagcgatttccagtccactgtgagatattaatcagttacctaggactaatgacagatcatttccttctgatgagaactaggagggtttgccttctctgagaccagctattacaactgtgcctctagggagttactcagcctaattgagccctattattttaacttaacaaaataaatacagaagtacctatttctaaacaatgatttaaagtctatatcccctaagcggagttgttgtttttctccctaatctatcagctgcactacttgagaaaatttaaagtgtttctagttaaattatttccttcttgagcgatctaatgtttcttgtaatattgatgatcctactaattatcctgctgttctttaattaatgcttaatgaataatatggcactgtaaaatagcttctgcaacaagggaagttaaattttgagacttttttccccaaaggatactgactgtaatacaattaccaattcacaatgataaaaatattttgaaaggttaattttatactgtccacctatctatatattcttctactgaaatgattttgatatctttggctttccggtatctatttttgccatacattttgctgttttgcaaagtttgtataagaacacataacactactgaattataaaaattcaatcataaaagtcaaaatatattacataatatagtttaatgaatcattacatttataataacaaaggccacaatttaattaattggtaagatataatgcaaaaaaaaaaagagaaatgtttgccttatgtatattccctttatttcctttaccttttgtttttccttggacctaaacagagaaaataatgcttatgtatctgaagaaaaggtcagatctattggaaatgacagcccgatacttgagcctcctctttaaaaggtatccagccctgatattttgtgtaaataaaatgtttttaaaacctgttagttaaaacacttaggtgatgggcactgctgcttataaattcatcttttggttgaatcctcactatgctatttggtacctaaaaatattctccaaacccttgctgccagttcctctttgataaatatatagttaattcgaaataaaatccattgcaattcatttatgagttatcttacatatcacaaagaccaattagaattagtcattattcttgatgaagagtctgtttttaatcataaaaatcatgacagttactcagacccaggcatttcaacagagctaacaccaccttcagataggcacaccatgcataactcttgggaagttgagctttgctaaataaaagatatttctgctgatcaaagatgatcaagctttctgtgtattggaacagaaagtaacaaagaggaatgagccaggagaacaaactaattccaaaaaaaaaaaaaaaaaaaaaaaaaaaaaa

SEQ ID NO: 2191 - protein, 349 aa, Homo sapien
MSSLSGKVQTVLGLVEPSKLGRTLTHEHLAMTFDCCYCPPPPCQEAISKEPIVMKNLYWIQKNAYSHKENLQLNQETEAIKEELLYFKANGGGALVENTTTGISRDTQTLKRLAEETGVHIISGAGFYVDATHSSETRAMSVEQLTDVLMNEILHGADGTSIKCGIIGEIGCSWPLTESERKVLQATAHAQAQLGCPVIIHPGRSSRAPFQIIRILQEAGADISKTVMSHLDRAILDKKELLEFAQLGCYLEYDLFGTDLLHYQLGPDIDMPDDNKRIRRVRLLVEEGCEDRILVAHDIHTKTRLMKYGGHGYSHILTNVVPKMLLRGITENVLDKILIENPKQWLTFK

SEQ ID NO: 2192 - DNA, 2952 bp, Homo sapien
aactgatcgcggcctagtcccgacgcgtgtgtgctagtgagccggagccggcgacggcggcagtggcggcccggcctgcaggagcccgacggggtctctgccatgggggagtgacgcgcctgcacccgctgttccgcggcagcggcgagacatgaggagaccccgcgacaggggcagcggcggcggctcgtgagccccgggatggaggagaaatacggcggggacgtgctggccggccccggcggcggcggcggccttgggccggtggacgtacccagcgctcgattaacaaaatatattgtgttactatgtttcactaaatttttgaaggctgtgggacttttcgaatcatatgatctcctaaaagctgttcacattgttcagttcatttttatattaaaacttgggactgcattttttatggttttgtttcaaaagccattttcttctgggaaaactattaccaaacaccagtggatcaaaatatttaaacatgcagttgctgggtgtattatttcactcttgtggttttttggcctcactctttgtggaccactaaggactttgctgctatttgagcacagtgatattgttgtcatttcactactcagtgttttgttcaccagttctggaggaggaccagcaaagacaaggggagctgcttttttcattattgctgtgatctgtttattgctttttgacaatgatgatctcatggctaaaatggctgaacaccctgaaggacatcatgacagtgctctaactcatatgctttacacagccattgccttcttaggtgtggcagatcacaagggtggagtattattgctagtactggctttgtgttgtaaagttggttttcatacagcttccagaaagctctctgtcgacgttggtggagctaaacgtcttcaagctttatctcatcttgtttctgtgcttctcttgtgcccatgggtcattgttctttctgtgacaactgagagtaaagtggagtcttggttttctctcattatgccttttgcaacggttatcttttttgtcatgatcctggatttctacgtggattccatttgttcagtcaaaatggaagtttccaaatgtgctcgttatggatcctttcccatttttattagtgctctcctttttggaaatttttggacacatccaataacagaccagcttcgggctatgaacaaagcagcacaccaggagagcactgaacacgtcctgtctggaggagtggtagtgagtgctatattcttcattttgtctgccaatatcttatcatctccctctaagagaggacaaaaaggtacccttattggatattctcctgaaggaacacctctttataacttcatgggtgatgcttttcagcatagctctcaatcgatccctaggtttattaaggaatcactaaaacaaattcttgaggagagtgactctaggcagatcttttacttcttgtgcttgaatctgctttttacctttgtggaattattctatggcgtgctgaccaatagtctgggcctgatctcggatggattccacatgctttttgactgctctgctttagtcatgggactttttgctgccctgatgagtaggtggaaagccactcggattttctcctatgggtacggccgaatagaaattctgtctggatttattaatggactttttctaatagtaatagcgttttttgtgtttatggagtcagtggctagattgattgatcctccagaattagacactcacatgttaacaccagtctcagttggagggctgatagtaaaccttattggtatctgtgcctttagccatgcccatagccatgcccatggagcttctcaaggaagctgtcactcatctgatcacagccattcacaccatatgcatggacacagtgaccatgggcatggtcacagccacggatctgcgggtggaggcatgaatgctaacatgaggggtgtatttctacatgttttggcagatactcttggcagcattggtgtgatcgtatccacagttcttatagagcagtttggatggttcatcgctgacccactctgttctctttttattgctatattaatatttctcagtgttgttccactgattaaagatgcctgccaggttctactcctgagattgccaccagaatatgaaaaagaactacatattgctttagaaaagatacagaaaattgaaggattaatatcataccgagaccctcatttttggcgtcattctgctagtattgtggcaggaacaattcatatacaggtgacatctgatgtgctagaacaaagaatagtacagcaggttacaggaatacttaaagatgctggagtaaacaatttaacaattcaagtggaaaaggaggcatactttcaacatatgtctggcctaagtactggatttcatgatgttctggctatgacaaaacaaatggaatccatgaaatactgcaaagatggtacttacatcatgtgagataactcaagaattacccctggagaataaacaatgaagattaaatgactcagtatttgtaatattgccagaaggataaaaattacacattaactgtacagaaacagagttccctactactggatcaaggaatctttcttgaaggaaatttaaatacagaatgaaacattaatggtaaaagtggagtaattatttaaattatgtgtataaaaggaatcaaattttgagtaaacatgatgtattacatcatcttcgaaaatagatatgatggattctagtgaagaccaaaattacttctgtttactttctatcaggaagcatctccattgtaaatatgtatttacatgtttattacaaagacccaaatgaaaaatttttagtccattttttgcatagcctaaagataaaataggaataaaagttctatatttatggaaaaaaaaaaaaaaaaaa

SEQ ID NO: 2193 - protein, 594 aa, Homo sapien
MAKMAEHPEGHHDSALTHMLYTAIAFLGVADHKGGVLLLVLALCCKVGFHTASRKLSVDVGGAKRLQALSHLVSVLLLCPWVIVLSVTTESKVESWFSLIMPFATVIFFVMILDFYVDSICSVKMEVSKCARYGSFPIFISALLFGNFWTHPITDQLRAMNKAAHQESTEHVLSGGVVVSAIFFILSANILSSPSKRGQKGTLIGYSPEGTPLYNFMGDAFQHSSQSIPRFIKESLKQILEESDSRQIFYFLCLNLLFTFVELFYGVLTNSLGLISDGFHMLFDCSALVMGLFAALMSRWKATRIFSYGYGRIEILSGFINGLFLIVIAFFVFMESVARLIDPPELDTHMLTPVSVGGLIVNLIGICAFSHAHSHAHGASQGSCHSSDHSHSHHMHGHSDHGHGHSHGSAGGGMNANMRGVFLHVLADTLGSIGVIVSTVLIEQFGWFIADPLCSLFIAILIFLSVVPLIKDACQVLLLRLPPEYEKELHIALEKIQKIEGLISYRDPHFWRHSASIVAGTIHIQVTSDVLEQRIVQQVTGILKDAGVNNLTIQVEKEAYFQHMSGLSTGFHDVLAMTKQMESMKYCKDGTYIM

SEQ ID NO: 2194 - DNA, 927 bp, Homo sapien
ggcagcgggcgaaaggagccggggcctggaggtttgcgtaccggtcgcctggtcccggcaccagcgccgcccagtgtggtttcccataaggaagctcttcttcctgcttggcttccacctttaacccttccacctgggagcgtcctctaacacattcagactacaagtccagacccaggagagcaaggcccagaaagaggtcaaaatggggtttatattttcaaaatctatgaatgaaagcatgaaaaatcaaaaggagttcatgcttatgaatgctcgacttcagctggaaaggcagctcatcatgcagagtgaaatgagggaaagacaaatggccatgcggattgcgtggtctcgggaattcctcaaatattttggaactttttttggccttgcagccatctctttaacagctggagcgattaaaaaaaagaagccagccttcctggtcccgattgttccattaagctttatcctcacctaccagtatgacttgggctatggaacccttttagaaagaatgaaaggtgaagctgaggacatactggaaacagaaaagagtaaattgcagctgccaagaggaatgatcacttttgaaagcattgaaaaagccagaaaggaacagagtagattcttcatagacaaatgaaatcatgcttaccaatcaaatctcaaagcacagaattattgacttgaatcatggtttttacagttttttaaatgctcaagattttgatattatagattttattttaaaatattaaaatgcaagatagttttgagctattttaaaataaaatttataacattcaacacaaaatcatggaggtgctctaaataacttttagatttcctctctctgtgtgcattaccaatatctaagtgtaaaattaataaattgttttgaattcctggaaaaaaaaaaaa

SEQ ID NO: 2195 - protein, 147 aa, Homo sapien
MGFIFSKSMNESMKNQKEFMLMNARLQLERQLIMQSEMRERQMAMRIAWSREFLKYFGTFFGLAAISLTAGAIKKKKPAFLVPIVPLSFILTYQYDLGYGTLLERMKGEAEDILETEKSKLQLPRGMITFESIEKARKEQSRFFIDK

SEQ ID NO: 2196 - DNA, 1077 bp, Homo sapien
ttagcacctggcactaggcggagagaggcggtaagccgcgaggaggaaaggactcacgtcccgctgtggaccgatcctgctaagcagagaatcgctgtggccggacgacggggcgtcgagacaagaagaaagacgttggcaactcccacaaggcctagggccacgtcccgccgtcctcggctgctgagcctgatgggacaagtagttttgcgaacggcttaacctactgattgaagaggtcggaagctctgaggcccggggcttccggaggtcgcggagatggaattggagcagagagaagggaccatggcagccgtgggctttgaggagttctcagcgccgccaggctcagagttggcgttgcctcccctatttggtggccacatcctggagagcgagctggagacggaagtggagtttgtgtcaggtggtctgggcggctcagggctccgggagcgagatgaagaggaagaggcagcccggggtcggcggcggcgccagcgggaattaaatcgcagaaagtaccaggcactaggtcggcgctgccgggagatcgagcaggtgaacgagcgggtcctgaacaggctccatcaggtgcagaggataactcggaggctgcagcaggaacggaggttcctcatgagagtgctggactcctacggggatgactaccgggccagccagttcaccattgtgctggaggatgagggcagccagggcacggatgcccccaccccaggcaatgcggagaatgagcctccagagaaagagacactgtccccgcccagaaggactcctgcacccccagaacccggcagcccagcccccggtgaggggcccagtgggcggaagaggcggcgagtgccacgggatggacgccgagcaggaaatgcgctgactccagagctggccccggtgcagattaaggttgaggaagactttggctttgaagcagatgaggccctggattccagttgggtttctcggggtccagacaaactgctgccctacccgaccctggccagcccagcctctgactgacgcatgcccaataaactgaccccacaccaaaaaaaa

SEQ ID NO: 2197 - protein, 253 aa, Homo sapien
MELEQREGTMAAVGFEEFSAPPGSELALPPLFGGHILESELETEVEFVSGGLGGSGLRERDEEEEAARGRRRRQRELNRRKYQALGRRCREIEQVNERVLNRLHQVQRITRRLQQERRFLMRVLDSYGDDYRASQFTIVLEDEGSQGTDAPTPGNAENEPPEKETLSPPRRTPAPPEPGSPAPGEGPSGRKRRRVPRDGRRAGNALTPELAPVQIKVEEDFGFEADEALDSSWVSRGPDKLLPYPTLASPASD

SEQ ID NO: 2198 - DNA, 1680 bp, Homo sapien
agagagctgtttactaggcacgactgcgaaggcaagggggcaccagctcaggactgcatctgcctgccatttcccttccactcctcctttctggagtctgacattagaaagccagcgagaaggaagattcaaacaaccaaccctgatttcctgcttctccttttcatgagtgttcctgtggtctctgcacctcctttctgtcccccggcagagggcagtagagatggccggcccaaggcctcggtggcgcgaccagctgctgttcatgagcatcatagtcctcgtgattgtggtcatctgcctgatgttatacgctcttctctgggaggctggcaacctcactgacctgcccaacctgagaatcggcttctataacttctgcctgtggaatgaggacaccagcaccctacagtgtcaccagttccctgagctggaagccctgggggtgcctcgggttggcctgggcctggccaggcttggcgtgtacgggtccctggtcctcaccctctttgccccccagcctctcctcctagcccagtgcaacagtgatgagagagcgtggcggctggcagtgggcttcctggctgtgtcctctgtgctgctggcaggcggcctgggcctcttcctctcctatgtgtggaagtgggtcaggctctccctcccggggcctgggtttctagctctgggcagcgcccaggccttactcatcctcttgcttatagccatggctgtgttccctctgagggctgagagggctgagagcaagcttgagagctgctaaaggcttacgtgattgcaagggttcagttccaaccatagtcagaggtggcacatctgctcagccatctcattttacagctaacgctgatctccagctccagcgatggaacccactacagaggaggtggggcccctgtgtcaaagaggccgaggggcagcaagggcagccagggcacctgtgacttcttagtacaagattgtctgtccttcaggacttccaaggctcccaaagactccctaaaccatgcagctcattgtcacaccaattcctgctttaattaatggatctgagcaaatcttcctctagcttcaggagggtggggagggagtgattgccgtcatggggccagacttccaggctgatttgccaaatgccaaaatgaaacctagcaaagaacttacggcaacaaacgaggacattaaaagagcgagcacctcagtgtctctggggacatggttaaggagcttccactcagcccaccatagtgagtgggccgccataagccatcactggaactccaaccccagaggtccaggagtgatctctgagtgactcaacaaagacaggacacatggggtacaaagacaaggcttgactgcttcaaagcttccctggacctgaagccagacagggcagaggcgtccgctgacaaatcactcccatgatgagaccctggaggactccaaatcctcgctgtgaacaggactggacggttgcgcacaaacaaacgctgccaccctccacttcccaacccagaacttggaaagacattagcacaacttacgcattggggaattgtgtgtattttctagcacttgtgtattggaaaacctgtatggcagtgatttattcatatattcctgtccaaagccacactgaaaacagaggcagagacatgt

SEQ ID NO: 2199 - protein, 185 aa, Homo sapien
MAGPRPRWRDQLLFMSIIVLVIVVICLMLYALLWEAGNLTDLPNLRIGFYNFCLWNEDTSTLQCHQFPELEALGVPRVGLGLARLGVYGSLVLTLFAPQPLLLAQCNSDERAWRLAVGFLAVSSVLLAGGLGLFLSYVWKWVRLSLPGPGFLALGSAQALLILLLIAMAVFPLRAERAESKLESC

SEQ ID NO: 2200 - DNA, 725 bp, Homo sapien
gctccgggtgtcccgagagttgtcctgcgccggtgttcccacgtgcggcctgaacctgagcgcataatgttatgaggagatgggagcactagtgattcgcggtatcaggaatttcaacctagagaaccgagcggaacgggaaatcagcaagatgaagccctctgtcgctcccagacacccctctaccaacagcctcctgcgagagcagattagtctctatccagaagttaaaggagagattgctcgtaaagatgaaaagctgctgtcgtttctaaaagatgtgtatgttgattccaaagatcctgtgtcttccttgcaggtaaaagctgctgaaacatgtcaagagccgaaggaattcagattgccgaaagaccatcattttgatatgataaatattaagagcattcccaaaggcaaaatttccattgtagaagcattgacacttctcaataatcataagcttttcccagaaacctggactgctgagaaaataatgcaagaataccagttagaacagaaagatgtgaattctcttcttaaatattttgttacttttgaagtcgaaatcttccctcctgaagacaagaaagcaatacgatcaaaatgaagaaaatcacagaaatttcctatgtgtactcctcatccctcctgctgtatattttctcattttttgcgtaataaattatgttaattaccaaaaaaaaaaaaaaaaaaaaaaaaaaaaa

SEQ ID NO: 2201 - protein, 175 aa, Homo sapien
MGALVIRGIRNFNLENRAEREISKMKPSVAPRHPSTNSLLREQISLYPEVKGEIARKDEKLLSFLKDVYVDSKDPVSSLQVKAAETCQEPKEFRLPKDHHFDMINIKSIPKGKISIVEALTLLNNHKLFPETWTAEKIMQEYQLEQKDVNSLLKYFVTFEVEIFPPEDKKAIRSK

SEQ ID NO: 2202 - DNA, 760 bp, Homo sapien
gagttttcatttgtggtgagattctctcccaggccacaagacatttcctgctcggaaccttgtttactaatttccactgcttttaaggccctgcactgaaaatgcaagctcaggcgccggtggtcgttgtgacccaacctggagtcggtcccggtccggccccccagaactccaactggcagacaggcatgtgtgactgtttcagcgactgcggagtctgtctctgtggcacattttgtttcccgtgccttgggtgtcaagttgcagctgatatgaatgaatgctgtctgtgtggaacaagcgtcgcaatgaggactctctacaggacccgatatggcatccctggatctatttgtgatgactatatggcaactctttgctgtcctcattgtactctttgccaaatcaagagagatatcaacagaaggagagccatgcgtactttctaaaaactgatggtgaaaagctcttaccgaagcaacaaaattcagcagacacctcttcagcttgagttcttcaccatcttttgcaactgaaatatgatggatatgcttaagtacaactgatggcatgaaaaaaatcaaatttttgatttattataaatgaatgttgtccctgaacttagctaaatggtgcaacttagtttctccttgctttcatattatcgaatttcctggcttataaactttttaaattacatttgaaatataaaccaaatgaaatattttaactgataaaaaaaaaaaaaaaaaataaaaaa

SEQ ID NO: 2203 - protein, 115 aa, Homo sapien
MQAQAPVVVVTQPGVGPGPAPQNSNWQTGMCDCFSDCGVCLCGTFCFPCLGCQVAADMNECCLCGTSVAMRTLYRTRYGIPGSICDDYMATLCCPHCTLCQIKRDINRRRAMRTF

SEQ ID NO: 2204 - DNA, 2221 bp, Homo sapien
gtgaccggaggcgagaaaccccgcctcggcaccctgacgcagcgcaggacccgccccgcgcgtgacgccagcgtcaggccagccccggcatgctctgcggccgcccgcggtccagctccgacaacaggaattttctccgagagcgggccgggctcagttcagctgctgtccagacccggatcggcaacagtgccgcctccagacgttctcctgccgctcgcccgcccgtcccagcgcccccagccctcccgcgagggcgccccgggacggaaggatccaccagtctgtcggcgcccgccgttctcgtggtcgccgtcgccgtcgtcgtggtggtagtctccgccgtcgcctgggccatggccaattacatccacgtccctcccggctccccggaggtgcccaagctgaacgtcaccgttcaggatcaggaggagcatcgctgccgggagggggccctgagcctcctgcaacacctgcggcctcactgggacccccaggaggtgaccctgcagctcttcacagatggaatcacaaataaacttattggctgttacgtgggaaacaccatggaggatgtagtcctggtgagaatttatggcaataagactgagttattagtcgatcgagatgaggaagtaaagagttttcgagtgttgcaggctcatgggtgtgcaccacaactctactgtaccttcaataatggactatgctatgaatttatacaaggagaagcactggatccaaagcatgtctgcaacccagccattttcaggctaatagctcgtcagcttgctaaaatccatgctattcatgcacacaatggctggatccccaaatctaatctttggctaaagatgggaaagtatttctctctcattcccacaggatttgcagatgaagacattaataaaaggttcctaagtgatatcccaagctctcagattctccaggaagagatgacttggatgaaggagattctttccaacctgggctcacctgttgtgctttgccataatgacctattgtgtaagaatataatctacaatgagaaacaaggtgatgtacagttcattgattatgaatattctggatacaactacctggcatatgatattggaaatcatttcaatgaatttgcaggtgtgagtgatgtagactatagtctgtatccagatagagaactacagagtcagtggctgcgtgcttaccttgaagcctacaaagaatttaagggctttgggactgaagttactgaaaaggaggtagaaatactcttcattcaagtcaatcagtttgcattggcttctcatttcttttggggattgtgggctttgattcaagccaaatactccactattgagtttgatttccttgggtatgcaattgttcgttttaaccagtactttaaaatgaagcctgaggttactgcattaaaagtgcctgagtaaagaagagatttaattattctccagtagctgagcaatgcttgtgaatcttttcttaagaaatcccaaaaagccaatattagttaaaattctgttgtttaatttggttatcttgctttataaattatgcctctaaacaatcaaatctatttttgaaatagactgaatgatgtcaagaaatatacctactgctatccgtatgtggtggattagaaatgtgttaaatctgcaaaaggtataaagatgtcagtttaatttctttgataatttaacctatgttgtatgtgaattatttattataaacttagcacgattctgtgactgtttttctctgtttcacgttcgttgagtgtaagcaatgaaaatgtcccaaataagttttttaagttttactttaataagattaatttcagtaaacattctagttgttcagtgtaacctttttatcttgatgcattgtaagtaaaatgaatcatttactcttgaaatgccagtcattgactgatgtagataatttaggattttcatataaaaatagctgtttaggaaggtgaaatacattcactgtctctgttggtggtacatcttgttgaattcaatattagaaagtatttctttttggggtaatataacttagaattaaatccctgtttctctatgtagtctggcagtataaatataaatatttaccatataatcttggaataagtattagttaatgttaccaaaatctgtattaaataatgttttcaaatgctaaaaaaaaaaaaaaaaaa

SEQ ID NO: 2205 - protein, 452 aa, Homo sapien
MLCGRPRSSSDNRNFLRERAGLSSAAVQTRIGNSAASRRSPAARPPVPAPPALPRGRPGTEGSTSLSAPAVLVVAVAVVVVVVSAVAWAMANYIHVPPGSPEVPKLNVTVQDQEEHRCREGALSLLQHLRPHWDPQEVTLQLFTDGITNKLIGCYVGNTMEDVVLVRIYGNKTELLVDRDEEVKSFRVLQAHGCAPQLYCTFNNGLCYEFIQGEALDPKHVCNPAIFRLIARQLAKIHAIHAHNGWIPKSNLWLKMGKYFSLIPTGFADEDINKRFLSDIPSSQILQEEMTWMKEILSNLGSPVVLCHNDLLCKNIIYNEKQGDVQFIDYEYSGYNYLAYDIGNHFNEFAGVSDVDYSLYPDRELQSQWLRAYLEAYKEFKGFGTEVTEKEVEILFIQVNQFALASHFFWGLWALIQAKYSTIEFDFLGYAIVRFNQYFKMKPEVTALKVPE

SEQ ID NO: 2206 - DNA, 4368 bp, Homo sapien
cgaaatgagagcaaaaagggagagagcaggaaagcgagcacaggcgagtacagtatacaaagtgttttgagtttctgactggcgtgccggaaagatcatgttagcacacccagaaactccacacgatgcagaccccagaggtaccagcagaaaggtcccctcgtagacggagtatctcagggaccagtacatcagagaaacccaactccatggacactgcaaatacctcacccttcaaagtaccaggattcttcagcaagcgcctgaaaggctccatcaagaggaccaaaagccagtcaaagcttgacagaaacacgagctttcggcttccatcccttcgcagtacagatgacaggtctcgtgggctgcctaaactaaaagagtcacgttcccatgaatccttgctgagcccatgcagcacagtggaatgtctggatcttggtagaggggaacctgtatcagtgaaaccacttcatagtagcatccttggacaagacttctgctttgaggttacctacttaagtggaagtaaatgcttcagctgtaattctgcttctgagagagacaagtggatggaaaaccttcgcaggacagttcaacctaataaggacaattgcaggcgagctgaaaatgttcttcgtttatggatcattgaagccaaggaccttgcccctaaaaagaaatatttctgcgaactgtgccttgatgataccctctttgctcgtacaaccagcaagaccaaagcagacaatattttctggggcgaacattttgaattcttcagccttccacctcttcatagtatcacagttcacatttacaaggatgtggaaaaaaagaaaaaaaaggacaagaataattatgtagggctagtcaacatccccactgccagtgtgactggtcgccaatttgtagaaaagtggtatccagtgagtacacctacacccaacaaaggaaagacaggaggaccttctattcggattaaatcacgtttccaaactatcaccattctgcctatggagcaatacaaagaatttgcagaatttgtcaccagcaactacaccatgctgtgttctgtccttgagccagtaattagtgtgagaaataaagaggagttggcttgtgccttagtgcacattcttcaaagtactggcagagccaaggattttctgactgacttggtgatgtctgaggtggatcgttgtggagagcatgatgtcttgatcttcagagagaacactattgccaccaaatccattgaggaatacctcaagttggtgggacaacagtatcttcatgacgcactgggggagtttatcaaagctttgtatgagtccgatgagaactgtgaagtggatcccagcaaatgttcatctagtgaactgatagaccatcagagcaacctgaaaatgtgctgtgagctggctttctgcaagatcatcaactcttactgtgttttccctcgtgagttgaaagaagtgtttgcatcatggaagcagcagtgcctgaaccgtggcaagcaagacatcagcgagaggctcatcagtgcctcattatttctccgttttctgtgtccagccattatgtctcccagtcttttcaaccttatgcaggagtatcctgatgaccgcacatctcggactctaactcttattgccaaggtcattcagaacctggccaactttgccaagtttggtaacaaagaggaatacatggcattcatgaatgattttttagaacatgaatggggtggaatgaagcgctttcttttggagatctctaatccagacaccatctcaaacaccccaggctttgatggttacattgatctgggccgagagctttcagttttgcattccttactgtgggaagtagtttcccaacttgataagggtgaaaattccttcctacaggcgaccgtggcaaaattggggcctctccctcgtgttcttgctgatattaccaagtcattgactaatcctacgccaatacaacagcaactgagacgcttcactgaacataactccagtccaaatgtcagtggaagcctctcctctgggctgcagaaaatatttgaagaccccactgacagtgatttgcataaactaaaatctccaagccaggacaacacagacagctacttcagagggaaaacattattgctggttcagcaagcctcctctcagagcatgacttattctgaaaaggatgaaagggaaagtagccttcctaatggtcggagcgtctccctcatggacctccaggacactcatgctgctcaagtggagcatgcatctgtcatgcttgatgtgcctatacgcttgaccggaagccagctttccataacccaggtggccagcatcaaacagctgcgggaaacccagagcactccccaaagtgcaccccaagtgagaaggcccctgcacccagccttgaaccagccaggtggccttcagcccttgtcgttccagaaccctgtctatcacctcaataacccaattccagcaatgccaaaggcctctatagattccagtttggagaacctaagcactgccagttccagaagccaaagtaacagtgaagacttcaagctcagtggacccagcaatagcagcatggaagatttcactaaacgtagcactcagagtgaggacttctccaggcggcacacggtgccagatagacacatacctcttgctttgccacgacaaaatagtactgggcaggcccagatccgaaaagtggaccagggtgggttaggtgcccgagccaaagccccaccatccctgccacacagtgcttctttacgtagcaccgggagcatgtcagtggtgtccgcagccctggtggccgaacctgtgcagaatgggagccggtcccggcagcagtcctcttcctccagagagagccctgttcccaaagttagagcaatccagagacaacagacacagcaggttcagtcacctgtggactctgccacaatgtccccagtagagaggacagcagcctgggttctgaacaatgggcagtatgaagaggatgtggaagaaactgagcaaaatctagatgaagccaagcatgctgagaagtatgaacaagaaattactaaactgaaggagcgcctgagagtttccagccggcgactggaggaatatgaacgccgcttgctggtgcaggagcagcagatgcagaagctgctgctggaatacaaggcccgactggaggacagcgaggagcggctccgaagacagcaggaagaaaaagatagccagatgaaaagcatcatcagcaggctaatggctgtggaagaggaactgaagaaggatcatgctgagatgcaagcagttattgatgcaaagcagaaaataattgatgcacaggaaaaacggatcgtgtccctggattcagccaacaccagactgatgagcgcgctgacccaagtgaaggagcggtacagcatgcaggtccgcaatggcatctcccccaccaaccccaccaagctttccatcacggagaatggtgaattcaaaaacagcagctgctgacgggctttgtctgtggaaggagacagaaggaaattgacccactctcctatctccagacctttacctagcccctccaggtttacagaatgttgctacttcacaatggcgatgtggtgagaaactcctgaatgaagaaaggaaccttgtctttcagggcataaggcggcgacttccaaggtcaatgcttttcccccacatctctatgtacatagggaacttagttctgggccatgtacagaaaatatcactgtaatataccaaaaggaagttaataatgtagattacctttttgattattgctatttttattattgttttcctcttgttgaaagcactgcagttgttacaggaagtaaagtaggaatgttgtgtgagcgagacatgagcctgtagttcagtaggtagagaccaagcatctatctgatagaacacatggagtgcaataggacattgtgagaaggatttttcagggattcatctactagtttaaaaaccccactctggccctcttgtcctttcagaaaacatgcaaataccaagatccatacaaaacaataatttattccactgatcaaccaagactggttctggttggacagctaatctgatttggggattcactgtttcagaggacacagacaaaagctgttgcatcaaaactggactttaggagtaatttctattgaactcctgtcaatatgtttatttcctctgtctacagcagatgggagtcttctcttttagacaggggctttttgtttttaaccccaattgtaataaagggtgttctttttcctctttagaaaaaaaaaaaaaaaaaaaa

SEQ ID NO: 2207 - protein, 1139 aa, Homo sapien
MQTPEVPAERSPRRRSISGTSTSEKPNSMDTANTSPFKVPGFFSKRLKGSIKRTKSQSKLDRNTSFRLPSLRSTDDRSRGLPKLKESRSHESLLSPCSTVECLDLGRGEPVSVKPLHSSILGQDFCFEVTYLSGSKCFSCNSASERDKWMENLRRTVQPNKDNCRRAENVLRLWIIEAKDLAPKKKYFCELCLDDTLFARTTSKTKADNIFWGEHFEFFSLPPLHSITVHIYKDVEKKKKKDKNNYVGLVNIPTASVTGRQFVEKWYPVSTPTPNKGKTGGPSIRIKSRFQTITILPMEQYKEFAEFVTSNYTMLCSVLEPVISVRNKEELACALVHILQSTGRAKDFLTDLVMSEVDRCGEHDVLIFRENTIATKSIEEYLKLVGQQYLHDALGEFIKALYESDENCEVDPSKCSSSELIDHQSNLKMCCELAFCKIINSYCVFPRELKEVFASWKQQCLNRGKQDISERLISASLFLRFLCPAIMSPSLFNLMQEYPDDRTSRTLTLIAKVIQNLANFAKFGNKEEYMAFMNDFLEHEWGGMKRFLLEISNPDTISNTPGFDGYIDLGRELSVLHSLLWEVVSQLDKGENSFLQATVAKLGPLPRVLADITKSLTNPTPIQQQLRRFTEHNSSPNVSGSLSSGLQKIFEDPTDSDLHKLKSPSQDNTDSYFRGKTLLLVQQASSQSMTYSEKDERESSLPNGRSVSLMDLQDTHAAQVEHASVMLDVPIRLTGSQLSITQVASIKQLRETQSTPQSAPQVRRPLHPALNQPGGLQPLSFQNPVYHLNNPIPAMPKASIDSSLENLSTASSRSQSNSEDFKLSGPSNSSMEDFTKRSTQSEDFSRRHTVPDRHIPLALPRQNSTGQAQIRKVDQGGLGARAKAPPSLPHSASLRSTGSMSVVSAALVAEPVQNGSRSRQQSSSSRESPVPKVRAIQRQQTQQVQSPVDSATMSPVERTAAWVLNNGQYEEDVEETEQNLDEAKHAEKYEQEITKLKERLRVSSRRLEEYERRLLVQEQQMQKLLLEYKARLEDSEERLRRQQEEKDSQMKSIISRLMAVEEELKKDHAEMQAVIDAKQKIIDAQEKRIVSLDSANTRLMSALTQVKERYSMQVRNGISPTNPTKLSITENGEFKNSSC

SEQ ID NO: 2208 - DNA, 3477 bp, Homo sapien
agacccgacgcccggggtcctcgaagacgcgtccgccgccgtgcccgtcgccatgaaccgcttcagggtgtccaagttccggcacaccgaggctcggccgccccgccgcgagtcctggatcagtgacattcgagcaggaaccgccccttcatgcaggaaccacatcaaatcaagctgcagcttgatcgccttcaactccgaccgtcctggtgtactgggcattgtgcctctgcaaggccaaggagaggacaagcgacgcgtggcccacctgggctgccattcagacctagtcaccgacttggacttctcgccctttgatgacttcctcctggccacaggctcggctgacaggacggtaaaactctggcgactgccagggcctggccaggccctgccctcagcacccggggtggtgctgggccccgaggacctcccagtggaggtactgcagttccaccccacctctgacggcattctggtgagcgcagcaggcaccactgtgaaggtctgggacgcagccaagcagcagcccctgacagagctggcagcccatggggacctggtgcagagcgccgtctggagccgagatggagccctggtgggcacggcgtgcaaggacaagcagctgcggatctttgaccccagaacaaagccgcgggcctctcagagcacgcaggcccatgagaacagcagggatagccggctggcatggatgggcacctgggagcaccttgtgtctactggattcaaccagatgcgtgagcgcgaagtgaagctgtgggacacgcggttcttctccagcgccctggcctccctcaccttggacacctcgcttgggtgtctcgtgcctctgctggaccctgactctgggctcctggtcctggcaggaaagggcgagaggcagctgtactgttacgaggtggtcccgcagcagccggcgctgagcccagtgacccagtgtgtcctggagagcgtgctgcgtggggctgcccttgtgccccggcaggcgctggccgtcatgggctgcgaggtactccgcgtcctacagctgagcgacacagccatcgtgcccatcggctaccatgtgccccgcaaggctgtggagttccacgaggacctgttcccggacactgccggctgtgtgcctgccaccgacccccatggctggtgggctggggacaaccagcaggtgcagaaggtcagcctcaaccccgcctgccggccccacccgagcttcacttcctgtctggtgccccctgcggagcccctccctgacacagcccagcctgcggtgatggagacacccgtgggtgatgcagacgcaagcgagggtttctcttcccctcccagttcgctgacctcgccctccacgccctccagcctggggccctcactctccagcaccagtggcatcgggaccagccccagtttgaggtcgctgcagagcctgctgggccccagttccaagttccgccatgctcagggcactgtcctgcaccgagacagccacatcaccaacctcaaggggctcaacctcaccacacctggtgagagtgacggcttctgtgccaacaagctgcgtgtggccgtgccgctgctcagcagcgggggacaggtggctgtgcttgagctacggaagcctggccgcctgcccgacacggcactgcccacgctgcagaatggggcagctgtgactgatctggcctgggacccctttgacccccatcgcctcgctgtggctggtgaggacgccaggatccgactgtggcgggtacccgcagagggcctggaagaggtgctcaccacgccagagactgtgctcacaggccacacggagaagatctgctccctgcgcttccacccactggcagccaatgtgctggcctcgtcctcctatgacctcactgttcgcatctgggaccttcaggctggagctgatcggctgaagctgcagggccaccaagaccagatcttcagcctggcctggagtcctgatgggcagcagctggccactgtctgcaaggatgggcgtgtgcgggtctacaggccccggagtggccctgagcccctgcaggaaggcccagggcccaagggaggacgcggagctcgcattgtctgggtatgtgatggtcgctgtctgctggtgtctggctttgacagccaaagtgagcgccagctgctcctatatgaagctgaggccctggccggcggacccttggcagtgttgggcctggacgtggctccctcaaccctgctgcccagctacgacccagacactggcctggtgctcctgaccggcaagggcgacacccgtgtattcctgtacgagctgctccccgagtcccctttcttcctggagtgcaacagcttcacgtcgcctgacccccacaagggcctcgtcctcctgcctaagacggagtgcgacgtgcgggaagtggagctgatgcggtgcctgcggctgcgtcagtcctccctggagcctgtggccttccggctgccccgagtccggaaagagttcttccaggatgacgtgttcccagacacggctgtgatctgggagcctgtgctcagtgccgaggcctggctgcaaggcactaatgggcagccctggcttctcagcctgcagcctcctgacatgagcccagtgagccaagccccccgagaggcccctgctcgtcgggccccatcctcagcgcagtacctggaagaaaagtctgaccagcaaaagaaggaggagctgctgaatgccatggtggcaaaactggggaaccgggaggacccactcccccaggactcctttgaaggcgtggacgaggacgagtgggactagcctgcgcccccgtcacctccacctcacctgtgctgccacttcctagtgcacacctcacggctcatcctcaagctggaagatacctctctggccccggcacatgtcacccctgcactcctgccttcccgtgggcacttccacatcctctgggcctctggcagttcccagggactgttttcacctctgctgtctctggggtcagctgctgctcatcagctgcccgctagcatgtggccaggggtgcagggtggcggggggtcagcagcatgtccctgggcaggccctgggcaccctgtctcccctggtctcactgctgacctgggctggtcccagcctggattggcctcatccaggatctttggtcaccccacgctgccccatcttgcctgctgttccagttctggtcaagggccttgggggctggccccccaccaggccttctagagcagcaccagtctcagggccctgggaccagctgccctacttcccaggtttgtagccaggagaagggggcatcacagagctgatggtccaataaggggggtgtgagccccgcagggactggcccgcacctgccttggatgttttcagcaattaaacttttttaagctggcaaaaaaaaaaaaaaaaaaaaaaaaaaaaaaaaa

SEQ ID NO: 2209 - protein, 925 aa, Homo sapien
MNRFRVSKFRHTEARPPRRESWISDIRAGTAPSCRNHIKSSCSLIAFNSDRPGVLGIVPLQGQGEDKRRVAHLGCHSDLVTDLDFSPFDDFLLATGSADRTVKLWRLPGPGQALPSAPGVVLGPEDLPVEVLQFHPTSDGILVSAAGTTVKVWDAAKQQPLTELAAHGDLVQSAVWSRDGALVGTACKDKQLRIFDPRTKPRASQSTQAHENSRDSRLAWMGTWEHLVSTGFNQMREREVKLWDTRFFSSALASLTLDTSLGCLVPLLDPDSGLLVLAGKGERQLYCYEVVPQQPALSPVTQCVLESVLRGAALVPRQALAVMGCEVLRVLQLSDTAIVPIGYHVPRKAVEFHEDLFPDTAGCVPATDPHGWWAGDNQQVQKVSLNPACRPHPSFTSCLVPPAEPLPDTAQPAVMETPVGDADASEGFSSPPSSLTSPSTPSSLGPSLSSTSGIGTSPSLRSLQSLLGPSSKFRHAQGTVLHRDSHITNLKGLNLTTPGESDGFCANKLRVAVPLLSSGGQVAVLELRKPGRLPDTALPTLQNGAAVTDLAWDPFDPHRLAVAGEDARIRLWRVPAEGLEEVLTTPETVLTGHTEKICSLRFHPLAANVLASSSYDLTVRIWDLQAGADRLKLQGHQDQIFSLAWSPDGQQLATVCKDGRVRVYRPRSGPEPLQEGPGPKGGRGARIVWVCDGRCLLVSGFDSQSERQLLLYEAEALAGGPLAVLGLDVAPSTLLPSYDPDTGLVLLTGKGDTRVFLYELLPESPFFLECNSFTSPDPHKGLVLLPKTECDVREVELMRCLRLRQSSLEPVAFRLPRVRKEFFQDDVFPDTAVIWEPVLSAEAWLQGTNGQPWLLSLQPPDMSPVSQAPREAPARRAPSSAQYLEEKSDQQKKEELLNAMVAKLGNREDPLPQDSFEGVDEDEWD

SEQ ID NO: 2210 - DNA, 2421 bp, Homo sapien
cagtgctgcgggctccgggcaatggatgcccccggggccctggcccagaccgccgcccccggtccgggcaggaaggagctgaagatcgtgatcgtgggcgacggcggctgcggcaagacctcgctgctcatggtgtacagccagggctccttccccgagcactacgccccatcggtgttcgagaagtacacggccagcgtgaccgttggcagcaaggaggtgaccctgaacctctacgacacggccgggcaagaagactatgaccggctgcggcccctgtcctaccagaacacccacctcgtgctcatctgctatgacgtcatgaatcccaccagctacgacaacgtcctcatcaagtggttccctgaggtcacgcatttctgccgcgggatccccatggtgctcatcggctgcaagacagacctgaggaaggacaaggagcagccgcggaagctccgggccgcccagctggagcccatcacctacatgcagggcctgagcgcctgcgaacagatccgagctgctctctacctggaatgttccgccaagtttcgggagaatgtggaggacgtcttccgggaggccgccaaggtggctctcagcgctctgaagaaggcgcaacggcagaagaagcgccggccctgcctgctgctctgacccagggcagacagacctcacgacagcactgacagggcccgggggcccaggtgccgattgcaccagggaggctgccccatcccgaccctccagctcatggtgtctggggcctgcggctagactcttggaacattctggaactctctcctttcctggctggggctctgaccacaaactcccctccaggctgcccctgggacatggtggtgatgtgggtgcaggagccagtgtctgttgtcgggactcgcaagtgccctcatcacagccacccccaccacgagtgtctccccagtgcagactcaagttatgcttgaaatgaaaaagtctatctggtagtgggtaaacgtagacctggcactgttccacgcgggcgccccaagcctgccactcctgtgtccctgcctccctgggctcccgagataggcaccactgtatcctccagctccttccttccttcccccaggaacacggaggccaccgagggggctgggcctatcaggaggacacaggctgcagcctggcacccacccctcccatctccaccccacatggaagacttgtcttcaacttggccactgtctttgcagagctgggcacatgtgcccagggggcagaaaaaatggcttctcagttgttaaaagtataccctggaccacccatctgaccatctccttaaggtttcacccaaagcccccagtgtcagagacttgggatgggaagaacagtcggctcccagtgtggtcatgagcaagttttctgtggactgttccccccactgcggcaggacaggactggcccacttagtcctcaagctcccaacctgctgtccctcaagccccgcttctaccagcctgtggagttcaggaggcgagacatcctggcctcctttgagaactgatgggatctaccccctgtccacgcgggacagtttctcagaactggttcatagaccacctgtgtcaccaacagccagatacctaatccctgagcctcctttgggaaggtctggggccgagggtctgggaatttttttttttttttttttttttgggacagagtctcattctgtcactcaggctagagtgcagtggcatgatcttggctcactgcaagctccacctcctgggttcaagcgattctcttgcctcagcctcctgagtagctgggactacatgcgcacaccaccacgtccggctaatttttgtatttttagtagagacagggtttcaccatgttggccaggctggtcttgaactcctgacctcgtgatccacccgccttagcctcccaaagtgctgggattacaggcgtgagccaccgtgcccggcccaggacttttaaaacaagcatcccaggggattccggtgcccaccagaagtcgcaagctgcttggctctggagggcgcctaggagtcggtgtcgcctaagatgggataatggcttcaggcaactcccagccttccccatatctcctgcctcagcccccctggcccagtgctggggcgtcagctaaacctgagcttccaagaagtcaggttgccaaaggaagaagccttctgagaccctccccaacccacccaggttcccaaggccctgccgtaccctggggaatcaaccaaggagttcttgttctcgaagaaccccaggcctcatgatggtctacggtagaggtccaacaactacagcctgtgggccacatctggccacagcctgatttgtaaataaagttttattggaacacaaaaaaaaaaaaaaaaaaaaaaa

SEQ ID NO: 2211 - protein, 211 aa, Homo sapien
MDAPGALAQTAAPGPGRKELKIVIVGDGGCGKTSLLMVYSQGSFPEHYAPSVFEKYTASVTVGSKEVTLNLYDTAGQEDYDRLRPLSYQNTHLVLICYDVMNPTSYDNVLIKWFPEVTHFCRGIPMVLIGCKTDLRKDKEQPRKLRAAQLEPITYMQGLSACEQIRAALYLECSAKFRENVEDVFREAAKVALSALKKAQRQKKRRPCLLL

SEQ ID NO: 2212 - DNA, 1291 bp, Homo sapien
gtgagcgcatgtgcgcatttatgagcatctacttgcggctgcactcagggccatttgaacccagtgcagagttatctctatgaggaggccccgggtctccagccccctccatctcccctggggtttggcatatttgacatggagccccatgccaagggatgcagctgttggtgtctgtccagtccattcaaggctagcctgcccatgcactgtggcaggggttggattggagggagagaacagagttgggaaaaacaacaggtttgagtcctataaagccataatttaactccagtagctgatgtcagacaagcttgtcctatgtcctatttgagtggcagcagcgccagcccagcaagaaggctgggggttgtcaaggttgtccccagaccttgcttgcagtggttggagaacccagggggctgccttgggccctctggccagagggaagcgggcagctctagccctggagattgtggtcacattggggcttgtttaggattggagggccaggtcacctccccagccaccctcccttctctcctctggggtccccactttagggcgactttgcccgaggcccacgcatccatccactcctttagtgccttgaatctcattcacaagcagccccctcccttccccttcccttctcactctgttgatgtaatcctcccacccccagtgtccatcctaagacaggcatcaaaagaggccctaactttacttcccaaatggtgctttttaaaaaacaccatcactacattaggggcaattttttcacacctccctgtcttcagaatgtaaagggtggggattatgtctctgtttaatatgcagccccctgcactgtggggtttggggcatgttcagtaataagaatgaatacaatagacaaagggggtgtgatgagtgttaacttggttgttccagaggtaaaccaggtctcagggaagagcctggagctgctattgcttaggaagttgtacgtgccttgaaatgtccactacctgaggacgcagcatctggtgggcccggggctgctggggccaaggagggaccttgaccttctggtgcctgcccctccccggcctacgtgccatccgcgtgacgctaggtcagcgctgccggttctttaccaaatgtgcttgcttctcctaagttatttataaagagaaatcactaatggactctactggtttgagtgcttctgagctggatgaccgaccgcctgtatgtttgtgtaattaattgccataataaactttgatgagtcaaaaaaaaaaaaaaa

SEQ ID NO: 2213 - protein, 161 aa, Homo sapien
MSYLSGSSASPARRLGVVKVVPRPCLQWLENPGGCLGPSGQREAGSSSPGDCGHIGACLGLEGQVTSPATLPSLLWGPHFRATLPEAHASIHSFSALNLIHKQPPPFPFPSHSVDVILPPPVSILRQASKEALTLLPKWCFLKNTITTLGAIFSHLPVFRM

SEQ ID NO: 2214 - DNA, 599 bp, Homo sapien
cgggacgcggatgcagacgcaggcggaggcgctgacggcggggatggccggggtggccacagctgccgcgggggcgtggacacagccgcagctccggccggtggagctcccccagcgcacgcgccaggtccgggcagagacgccgcgtctgccgcagggggtcacgaatgcggccgcacatattcaccctcagcgtgcctttcccgacccccttggaggcggaaatcgcccatgggtccctggcaccagatgccgagccccaccaaagggtggttgggaaggatctcacagtgagtggcaggatcctggtcgtccgctggaaagctgaagactgtcgcctgctccgaatttccgtcatcaactttcttgaccagctttccctggtggtgcggaccatgcagcgctttgggccccccgtttcccgctaagcctggcctgggcaaatggagcgaggtcccactttgcgtctccttgtaggcagtgcgtccatccttccctagggcaggaattcccacagttgctactttcctgggagggcctcatgttttatctggttcttaaatgtttgttactacagaaaataaaactgaggtattatt

SEQ ID NO: 2215 - protein, 105 aa, Homo sapien [sequence omitted]

SEQ ID NO: 2216 - DNA, 2284 bp, Homo sapien
gaatggaatgaaaagccttgtacaagaggcttcgtgccatgttcagcctgccccttagccttccactgtgtgaggacacagcattccttccttccaagtgctgcagctctcacaagacaatcaaacaagcccgcaccttgatcatgatcttcctagcctccggaacgcactttcagaccatgctgaagtctaaattgaatgtcttaacactgaaaaaggaacctctcccagcggtcatcttccatgagccggaggccattgagctgtgcacgaccacaccgctgatgaagacaaggactcacagtggctgcaagcactttcagaccatgctgaagtctaaattgaatgtcttaacactgaaaaaggaacctctcccagcggtcatcttccatgagccggaggccattgagctgtgcacgaccacaccgctgatgaagacaaggactcacagtggctgcaaggttacctacctgggcaaagtctccaccactggcatgcagtttttgtcaggctgcacagaaaagccagtcattgagctctggaagaagcacacgctagcccgagaggatgtctttccggccaatgccctcctggaaatccggccattccaagtttggctccatcatctcgaccacaaaggggaggccacagtgcacatggataccttccaggtggcccgcatcgcctactgcaccgccgaccacaacgtgagccccaacatcttcgcctgggtctacagggagatcaatgatgacctgtcctaccagatggactgccacgccgtggagtgcgagagcaagctcgaggccaagaaactggcccacgccatgatggaggccttcaggaagactttccacagtatgaagagcgacgggcggatccacagcaacagctcctccgaagaggtttcccaggaattggaatccgatgatggctgaatgaacttgagacgcttcagcaaaggcagcattggtcacggagttcaagggaatagatgagtaagcaacgtttcaaatttgggatgaaaagactgccaaactattggctgaccaaggtttttaaattcagaagagcaattctaaatctaaagaaatgtatcattaaagtaattacgttacattgaaacctgctgctgctgtgactgtgaggagggtgggagtgtggatggggaggaaggttctaggctctcttcttatttttctcatttcccaatgcctctctgtgggagagcttcatgccagttttcaccacgctcaggcaaatactctgcagctgttattggatgggccattccgatctgccttatgaaattccacaagaatgttaggggcaccctctttccccttctaacatccttagagggatgaaatctcagcatatgttgcaggacaccaaaaggaagaaaacaatcaagcaaataaaataaacagtcaaacaaaccaggagtttaaaacaacaaccccaacaacagaagccttggcaaagaggaataagtgatcagcaagtgaacacactctatgtcaactctccttttatccagctgagatttatggtaacttatttaattaatggtcctgtctgatgcatccttgatggcaagcttcaaatctgatttggtatcaccgaggaaaccttgcccccatcactcagcattgcacttagatacagaatgagttagataaacttggcttgtctagagacccatgtcatcttaacctaaagggaaatcttattgcgttatcataaaattgatgatatcttagggtcagaattgcccttttttttattttgaatgggaagctctcactaaaacaatcctgagatttcttaatttcatggttctttaaatattataaacacagagtcaacatagaatgaaattgtatttgttaaaatacacacattggaggacaagagcagatgactacttttcgaagtaatgctgctccttcctaaaagtctgttttcaatcctggtaatattaggggcactgcggcacctaagaagccttaaatgagagctaatccaatttagagagcgatggtgtcagcatttcggtctgcatatctgtgtgtccgtatctgcgtttgtgtgcgtgtacgtgtgcccctgtgtgtgggcccagttttcaggcatgtagaataagcatggagtcatattgaggaggactcacttcttgaagatatgcttgttgctttacaacatatgtaagctattctttagcataaatgcattcattctttaataaaaatatgtttgcattaaaaaaaaaaaaaaaaaaaaa

SEQ ID NO: 2217 - protein, 299 aa, Homo sapien
MFSLPLSLPLCEDTAFLPSKCCSSHKTIKQARTLIMIFLASGTHFQTMLKSKLNVLTLKKEPLPAVIFHEPEAIELCTTTPLMKTRTHSGCKHFQTMLKSKLNVLTLKKEPLPAVIFHEPEAIELCTTTPLMKTRTHSGCKVTYLGKVSTTGMQFLSGCTEKPVIELWKKHTLAREDVFPANALLEIRPFQVWLHHLDHKGEATVHMDTFQVARIAYCTADHNVSPNIFAWVYREINDDLSYQMDCHAVECESKLEAKKLAHAMMEAFRKTFHSMKSDGRIHSNSSSEEVSQELESDDG

SEQ ID NO: 2218 - DNA, 1361 bp, Homo sapien
ggggaggtagcccgcagtgcaggggcagcgcggcgcggggccaccgacgggacgcggctccgggaacatggctcgcttcgctctgactgttgtccggcatggagaaacaagatttaacaaggagaaaataatccaaggacaaggagtagatgaacctctttcagaaactggatttaaacaagcagcagctgctggtatatttctgaataatgtgaagtttactcatgctttctccagtgatctcatgaggacaaagcagaccatgcatggaattttggagagaagcaaattttgcaaagatatgacggtaaagtatgactcaagacttcgggaaaggaaatacggggttgtagaaggcaaagcgctaagtgagctgagggccatggccaaagcagccagggaagagtgccctgtgtttacaccgcccggaggagagacgctggaccaggtgaaaatgcgtggaatagacttttttgaatttctttgtcaactaatcctgaaagaagcggatcaaaaagaacagttttcccaaggatctccaagcaactgtctggaaacttctttggcagagatatttcctttaggaaaaaatcacagctctaaagttaattcagacagcggtattccaggattagcagccagtgtcttagttgtgagtcacggtgcttacatgagaagtctgtttgattattttctgactgaccttaagtgttccttaccagccactctgagcagatctgaacttatgtcagtcactcccaatacagggatgagtctctttatcataaactttgaggaaggaagagaagttaaaccaacggttcagtgtatttgtatgaacctacaggatcatctaaatggactgactgaaactcgctaaggttaaatctgcatcaaaatctaaccaatttgagcctctgaagggagtgccattggctttatttacttctctcctctgctagtcctgatttggaaacagttaaaagccaatttttagctccagtggaaccatagccacataaaactttaatggacaaccatatagaattaacttattttgtccaagtacagttggcattttccagaataattttaccaccctgctagatgtcatctctggattgcacatggatgatgaaggaactcagcattgaaagttgggggattagtaaccttgttacaacggtttctttttcattttagcctattttaatggctattggtaagatactgtatgtttttagtatctcatccagtgcttagaagaaagaatggtttataattcccagtacatgtttatattgactgtgttatatttttaaatcctttaaataaaaaatccttataagtttatgtaaagc

SEQ ID NO: 2219 - protein, 270 aa, Homo sapien
MARFALTVVRHGETRFNKEKIIQGQGVDEPLSETGFKQAAAAGIFLNNVKFTHAFSSDLMRTKQTMHGILERSKFCKDMTVKYDSRLRERKYGVVEGKALSELRAMAKAAREECPVFTPPGGETLDQVKMRGIDFFEFLCQLILKEADQKEQFSQGSPSNCLETSLAEIFPLGKNHSSKVNSDSGIPGLAASVLVVSHGAYMRSLFDYFLTDLKCSLPATLSRSELMSVTPNTGMSLFIINFEEGREVKPTVQCICMNLQDHLNGLTETR

SEQ ID NO: 2220 - DNA, 2015 bp, Homo sapien
acgcgcctcggggaacagcctggcccaaagcctcactcctcacgtcccaggggtggacgggggtccgggagcctcgagctccgggcaggcgtggcgaggctgaagtctgggtcttccgcgccccgcgaggaccacgccgcgacgtaatcgcccgcggggaggcgcggagtggagccgcagccagcccctcccgcactctgctgaccgcgcactagctgtccttgaggcaagaatacttgggagcggaaaaaaggtgggggtgttccccggggcgggggaggaggggcaaggccccagcaagcctcttggaaatctctccctgggaggggacgaggggcggccttcagttgcaaatgggaagggctcggataccggatttgaagcagtgtttgcacggcaagcgcagcttttatttagactgccggtttgtgagggttggctctcagagcgctgatggcgattatagtggaacttcaccttcacctgctatgcgccccgcagcgcgcccgctcccacgcccgcgtagctgaggacccagactcgccaggaaaggctagtgaggctggggcccgggcgggcccggccgggccgggtcaggggaggggcctggcggcaggggcggggcctcagctaaaggcgcggagcacccggcgccgagagcgctgagtagagcggcgcccgctcgagagaagtggggccgagatcgcgccgtcccagcccgcccgccggcgtctgcgctgctccggcgcccttacccctgctggcccttgcaaggcgcgaccggcggccatgcagccccggggctgaggccgccccatggcaaagccggcggtcccggcgacgacggcgcatggagaacttccgtaaggtgcgctccgaagaggcgccagcggggtgcggggccgagggaggcggcccgggctccggccccttcgcagacctggcgccgggcgcggtgcacatgcgggtcaaggaaggcagcaagatccggaacctgatggccttcgccaccgccagcatggcgcagccagccacgcgcgccatcgtcttcagcggctgcggccgggtcaccaccaaaaccgtcacgtgcgccgagatcctcaagcgccgcctggcgggcctgcaccaggtcacgcggctgcgctaccggagcgtacgcgaggtgtggcagagcctcccgcctgggcccacgcagggtcagacgcctggcgagccggccgctagtctcagcgtacttaagaacgtgcccggcctcgccatcctactttccaaggacgcgctggatccgcgacagcccggctaccagcccccgaatccccatcctggtccctcgtccccgccagccgcgccagcgtccaagaggagcctaggggaacccgcagctggagaaggctccgcgaagcgatcgcaacccgagccaggggttgcggacgaggatcagacggcctgaaactccggactgtgggccacctagtccggcaggatcttccgccagcgcctccaccttcagatgtacctccagcctttcactcctcggtcctccggagcccacaacctggacacagctcctcaagacaggtagcatggaccttaaggcgacaagagaggggccccaggagtggcaggagaggatccccgaccaccctagggaaacttcgtgcgataattgctgcttatgcccgtgttgcgtgaagacacggaacttcaccttttctgggaccttctttgggggagaatggtggacagtgggattctggaaacttgtttgggacccccaagggttaaagccacccagcattcacgaagagcacctgaagtatggaagctgactttctagttttctttcccctgcttcagaggagcatctctgagggttctagctcttttaacacctcttttccccctgctggcccagagggagacccaggactgaactctccaggcctcctcccctgagccctgcagctggctggagtcttgtttccaataaaacaagcacaaaaaaaaaaaaaaaa

SEQ ID NO: 2221 - protein, 199 aa, Homo sapien
MENFRKVRSEEAPAGCGAEGGGPGSGPFADLAPGAVHMRVKEGSKIRNLMAFATASMAQPATRAIVFSGCGRVTTKTVTCAEILKRRLAGLHQVTRLRYRSVREVWQSLPPGPTQGQTPGEPAASLSVLKNVPGLAILLSKDALDPRQPGYQPPNPHPGPSSPPAAPASKRSLGEPAAGEGSAKRSQPEPGVADEDQTA

SEQ ID NO: 2222 - DNA, 2378 bp, Homo sapien
aattccctccgccgcggtcgctgagcgagtgcggcgggaatgcggaaccggcgcgcgggctgaggccgcccgggatggcgcaggggcggcggcggcgggcggcctgcgcggggccctagcgagccgggctgacgctcccggccccggccccggcatcggcatcgcgggcgcatcgcggccatggccaaggagcggcgcagggcggtcctggagctgctgcagcggccggggaacgcgcgctgcgcggactgcggcgccccggatcccgactgggcctcctacactctgggcgtcttcatctgcctgagctgctcgggaatccaccggaatatcccccaggtcagcaaggtgaagtccgtccgcctggacgcctgggaggaggcccaagtggagttcatggcctcccacgggaacgacgccgcgagagccaggtttgagtccaaagtaccctccttctactaccggcccacgccctccgactgccagctccttcgagagcagtggatccgggccaagtacgagcgacaggagttcatctacccggagaagcaggagccctactcggcagggtaccgtgagggttttctctggaagcgtggccgggacaacgggcagtttttgagccggaagtttgtgctgacagaacgagagggtgctctgaagtatttcaacagaaatgatgccaaggagcccaaggccgtgatgaagatcgagcacctgaatgccaccttccagccggccaagatcggccacccccacggcctgcaggtcacctacctgaaggacaacagcacccgtaacatcttcatctaccatgaggacgggaaggagattgtggactggttcaatgcactccgagctgctcgcttccactacctgcaggtggcattcccaggggccagcgacgcagatctggtgccaaagctctccaggaactacctgaaggaaggctacatggagaagacggggcccaagcaaacggaaggcttccggaagcgctggttcaccatggatgaccgcaggctcatgtacttcaaagaccccctggacgccttcgcccgaggggaagtcttcattggcagcaaggagagtggctacacggtgctgcatgggttcccgccgtccacccagggccaccactggccacatggcatcaccatcgtcacgcccgaccgcaagtttctgtttgcctgcgagacggagtccgaccagagggagtgggtggcggccttccagaaggcggtggacaggcccatgctgccccaggagtacgcagtggaggcgcacttcaagcataaaccttagcgagtgcggctggaggaccacggacattggactcactgtggctggacggaggggacccgtggatgggggggctctggcgtcctgaggccacctggccccacctgctcctcagggcagcccggcgcggccaggtagggcccgagcttcagcttccaggatgcttctctggaacctcaaggcaggcagcccaggccctgggcctgatctctaaccccgtcatgctgctgctgaccacacccagccaacctgcccctccctgacccggggccccctttcctccagggcccagtctggctcccgagctcagacacagcccccaggagccgcccaccacggctgtgggaacttccaggcctcagcgcagagccctgcttggggccagcacggtgggcagctgccggccgctggggactgggccctgctcgcatgccgccccgccctccccccacctccacgactatttattgagcgcctgttgtgtgtcacggggctatgagggccgtggggtgtttgggtggattatccacacaggtcccggcccctgcccgggctggagttgccacagcctgtgctcctggtcctcacctggaggggccagcaggctgccgtcccaccacacgtggcctctgcgcccagcacggtgctcgccgacagtggtgtctgaacccttggggacgagggcctgggccgcggtgaggccaccagaggcaggagtggccctgggggtcccgggcactgtcgcgcttgctgcaggcggcccagccgtgtatttatttttcacctatctccttcctgtcaaggcaggccgggctccagggctccccttgcgtggggcatgtaggtgggggaggcgtctgcaggtcacctggggggcccagccctctcccagccttgcctggctgagctgtgttccaggggagccctggacaagccctcataggcagggagggggtttccgaggccaggcatccgccgccccgtgtcgcatcctggaataaaatgtggctctggcatggttaaaaaaaaaaaaaaaaaaaaaaaaaaaaaaaaaaaaaaaaaaaaaaaaaaaaaaa

SEQ ID NO: 2223 - protein, 374 aa, Homo sapien
MAKERRRAVLELLQRPGNARCADCGAPDPDWASYTLGVFICLSCSGIHRNIPQVSKVKSVRLDAWEEAQVEFMASHGNDAARARFESKVPSFYYRPTPSDCQLLREQWIRAKYERQEFIYPEKQEPYSAGYREGFLWKRGRDNGQFLSRKFVLTEREGALKYFNRNDAKEPKAVMKIEHLNATFQPAKIGHPHGLQVTYLKDNSTRNIFIYHEDGKEIVDWFNALRAARFHYLQVAFPGASDADLVPKLSRNYLKEGYMEKTGPKQTEGFRKRWFTMDDRRLMYFKDPLDAFARGEVFIGSKESGYTVLHGFPPSTQGHHWPHGITIVTPDRKFLFACETESDQREWVAAFQKAVDRPMLPQEYAVEAHFKHKP

SEQ ID NO: 2224 - DNA, 1844 bp, Homo sapien
agagtcgggtagacggcagcgggagcggtggcgtctccccgccttccctccctcccgggcctgggcgcccagccggacaggtgagcggcagccaggtgagcgcgcccacctgcgcctctccgcgcggcccgccctccccggcgccgggctcctctccgcgcccctgtcggcgcggaaccctggcctcgtccgcggcccagctccctggagcctcgcatcagcgggggcgcccccgcgagctgcgctctccccggccggagcgctcctcctccagcccccagcccgcagggtactttgccctcggagcgaaggaggctccagaactggtagagccgggccatcgggctgggcacctccccgcggcgcccgcagcgcggagtccactgaccggctcaaaggtatggcgttgacggtggatgtggccgggccagcgccctggggcttccgtatcacagggggcagggatttccacacgcccatcatggtgactaaggtggccgagcggggcaaagccaaggacgctgacctccggcctggagacataatcgtggccatcaacggggaaagcgcggagggcatgctgcatgccgaggcccagagcaagatccgccagagcccctcgcccctgcggctgcagctggaccggtctcaggctacgtctccagggcagaccaatggggacagctccttggaagtgctggcgactcgcttccagggctccgtgaggacatacactgagagtcagtcctccttaaggtcctcctactccagcccaacctccctcagcccgagggccggcagccccttctcaccaccaccctctagcagctccctcactggagaggcggccatcagccgcagcttccagagtctggcatgttccccgggcctccccgctgctgaccgcctgtcctactcaggccgccctggaagccgacaggccggcctcggccgcgctggcgactcggcggtgctggtgctgccgccttccccgggccctcgttcctccaggcccagcatggactcggaagggggaagcctcctcctggacgaggactcggaagtcttcaagatgctgcaggaaaatcgcgagggacgggcggccccccgacagtccagctcctttcggctcttgcaggaagccctggaggctgaggagagaggtggcacgccagccttcttgcccagctcactgagcccccagtcctccctgcccgcctccagggccctggccacccctcccaagctccacacttgtgagaagtgcagtaccagcatcgcgaaccaggctgtgcgcatccaggagggccggtaccgccaccccggctgctacacctgtgccgactgtgggctgaacctgaagatgcgcgggcacttctgggtgggtgacgagctgtactgtgagaagcatgcccgccagcgctactccgcacctgccaccctcagctctcgggcctgagcccgccatgccctcagcctgcctcactgctgggccagggtcatgcctatataagttggcatggcagggacaatggtgggcagttgctcttacatgagctaagtttggagacctgaggcccctttgtcctcgctgggtgggccaaggtctgggacctgtcttggactgtgggagactcaccctcaccttgccaggcctctcccctgcaggactggcattgcactagtctgaggtggccactgcctttgatcaacctttgtgtgcgagggtctaagtagggtcgaacacagaagtgggaaggagaggggtgggccaggggctaatggtgtcactgtgtaaagtttttgacatactagctctataaatatatgaatatggacaaaat

SEQ ID NO: 2225 - protein, 352 aa, Homo sapien
MALTVDVAGPAPWGFRITGGRDFHTPIMVTKVAERGKAKDADLRPGDIIVAINGESAEGMLHAEAQSKIRQSPSPLRLQLDRSQATSPGQTNGDSSLEVLATRFQGSVRTYTESQSSLRSSYSSPTSLSPRAGSPFSPPPSSSSLTGEAAISRSFQSLACSPGLPAADRLSYSGRPGSRQAGLGRAGDSAVLVLPPSPGPRSSRPSMDSEGGSLLLDEDSEVFKMLQENREGRAAPRQSSSFRLLQEALEAEERGGTPAFLPSSLSPQSSLPASRALATPPKLHTCEKCSTSIANQAVRIQEGRYRHPGCYTCADCGLNLKMRGHFWVGDELYCEKHARQRYSAPATLSSRA

SEQ ID NO: 2226 - DNA, 3693 bp, Homo sapien
cgcgccccgggctcggccgacccggcggggatctaggggtgggcgacttcgcgggaccgtggcgcatgtttcctgggagttactgatcatcttctttgaagaaacatgaagttacactatgttgctgtgcttactctagccatcctgatgttcctgacatggcttccagaatcactgagctgtaacaaagcactctgtgctagtgatgtgagcaaatgcctcattcaggagctctgccagtgccggccgggagaaggcaattgctcctgctgtaaggagtgcatgctgtgtcttggggccctttgggacgagtgctgtgactgtgttggtatgtgtaatcctcgaaattatagtgacacacctccaacttcaaagagcacagtggaggagctgcatgaaccgatcccttctctcttccgggcactcacagaaggagatactcagttgaattggaacatcgtttctttccctgttgcagaagaactttcacatcatgagaatctggtttcatttttagaaactgtgaaccagccacaccaccagaatgtgtctgtccccagcaataatgttcacgcgccttattccagtgacaaagaacacatgtgtactgtggtttattttgatgactgcatgtccatacatcagtgtaaaatatcctgtgagtccatgggagcatccaaatatcgctggtttcataatgcctgctgcgagtgcattggtccagaatgtattgactatggtagtaaaactgtcaaatgtatgaactgcatgttttaaagaagacaaatgcaaaccaaagcaacttagtaaaataataggtataaaaagttattctgtaagtctgttggttgtatcttgtatcagaatcccagtaagttaagttgtaaagactttggaataagtttcttttaaaaatatgacatagccagtgatgtgtttaattatataactgttcttactgattttattgccccctagcaataagccctttcctttgaatacatgtacaactttggtcatatgagaagcaggtgcgcagagaattccttgaaagatctgaggtttttaacataaagtctgatgtggttttcctctagcattccaaaaggtttttgctttgaaagtgttagcagaagcatgttgatgtgaattatgatttcttcatgtgctactgttagcacactgagtttttatagttgcacatcattcctcattgtgccttgttttatccattttataaatagagtagatatttgatataccactctgataactcatataaaaatatcatcataaaaagcttaatttcatcccttttatgttggttttaaaaggtaaatgcttaccatattttataattgagaactcttacatagtagaatccattctataatacatgtgttgacaaagctttagagaaagtttcctattctcttccatttcccctgcccaaagtgctgacataggcagtgatgaagaatctttaccaagattttcagggtgtacctatgaaattgctttaaatgcactgctggtgtaaataattagcaagcaaaagcgtttctgtgacttcaggtaccagcttaaagagcactagggatggggaacgaatgccaaatcagactccacctagagcaccaggaaacagcttgtaccctggtagggaaatggtgtcgctgaaaggggaggctgagccagtgcgagactgaacttgtgcagccttagccaagacaaagcagtgtttttcagcagacggctgatgggacaggaattgaagaagagaattgactcgtatgaacaggacagggtgaaaatgctgggaattataatgggaaacaaaactatctatgttcatattttgtaatatttcatttgttaagtttatatctggatataatgttctttttaaacaagtataatcatatcgtcggaggttaagattatgaaattttaaaatctctattcaagatgatgttcactccaaatacactacagaatttagtcaacattttatataatgtttcaataaatgtttctttcaataaagatactatgtgcccttcatagtaataaaatctcaatcttaaagcatgaatctaaaacataaatatttatattacagactcaattttacaaaattactaattgctctagtgcatatttgaactacaagcaactttttaggaatacctctttatacgtctacatattttagtatataaaaatagataatgctcttggacacattttgtattattcatgatctgaatagtagttagttaaaagatcatttgtaatattatgatcaactgttataaattaaggtcttaataccttttctgctctttcaaataactctaatgaatattcaagatattttagccttttaaaaagttgagatttagctcatggatatattttttggtagggaaacattagggtctccttttcttccttttacctagaatgcctcatttaaaagtgccttgaaaacatttagctccccttcttcatgagcatctgtagagctgaaagtattctggaactttagacagaaagctgaaaggaatctgcagtctcctgctgcagttcaactctgctgtttttcagtcatttcctactgtgagtggagtgatgtttgtgtgtgtgttggcaacatgcctaatgttttcttaatgatgacaacaaatattttaaaactgcatttatcattttttaggtcttcattaaattttaaaatgtaatatctgtttcccaccccctacattaggaggataatttcttaaaccacattgttttaattgatttttcttatcttgatttctttcattagaaactatccctaaatgtaaagatcttttgccttcaaatttggcttattttttctgatttatgagggtttgaaagaaagaattcacctaaaagattccatttccagttttataatgtatttcaggttctgaataacaatatttttccaaattgaaagtaaatattcaagaagttgatagcctggttaaaagttagatcctctattaccattctaagcacattcacttctatattgaagttttggtaaaaattcttttttcttttttaataaaaaattaggttattactttttttataaccagatttttaaagcactaggttttaaatcagtgggtatcataaaagccatatataaaagatcctttcttatagtaagacttgtgcttgttagcaggtttttctgttagtttttcccccataacatttaattattactaaaattgtatttacaatagtggtgccaaatcaaatggtaatttaaataaaatctattctgtgtttatgtagggtggtataaaaaagaggtcttcatttagacatgtgatttctaaaattccagaaagcaaaattgataagatgttagaaatttggaccgttatttataatcagggtagcattaaaatggagaaaagaaagttttctgaaaaaatgcagtaaatataagccacatttctaaagtttatttttatgaaagcttcttttaagattttgaaatctattctgcattcccaagagtttatgtttattgtattttatatgatctacaacatataaaattgtgtatttttctttggttgtccctattaacaaaaaagtattttaataaaaaattgaaatgaaaaaaaaaaaaaaaaaaaaaaa

SEQ ID NO: 2227 - protein, 223 aa, Homo sapien
MKLHYVAVLTLAILMFLTWLPESLSCNKALCASDVSKCLIQELCQCRPGEGNCSCCKECMLCLGALWDECCDCVGMCNPRNYSDTPPTSKSTVEELHEPIPSLFRALTEGDTQLNWNIVSFPVAEELSHHENLVSFLETVNQPHHQNVSVPSNNVHAPYSSDKEHMCTVVYFDDCMSIHQCKISCESMGASKYRWFHNACCECIGPECIDYGSKTVKCMNCMF

SEQ ID NO: 2228 - DNA, 2229 bp, Homo sapien
tttcacctcagcaaggccaggggatctgcacgttgtgttagacatggctaaagtagctgataccatcctgttcctccttgatccactagaaggctgggacagcaccggtgattactgtctttcctgcctctttgctcagggccttccgacctatacactagctgtccaggggatttctggcctcccactgaagaaacaaatagataccaggaagaagctaagtaaagcagtggagaagcgctttccgcatgacaaactcctcttgttagacactcaacaggaggcagggatgctgcttaggcagttggctaaccagaagcaacagcatcttgcttttcgagatcggcgggcctacctatttgcccatgctgttgattttgttcctagtgaagagaataacttggtgggcaccttgaaaatttcaggctatgttcgagggcagactctgaatgtcaataggttgctgcatatcgttggatatggtgatttccagatgaaacagatagatgcccccggagaccctttccctttaaatcctagaggaattaaaccccaaaaggacccagacatggcaatggagatttgtgctacggatgctgtagatgatatggaagaaggtcttaaagtcctaatgaaggcagacccttgtagacaggaatccttgcaagcagaggttatcccagatccaatggagggagagcaaacctggcccactgaggaggagctgagcgaggcaaaggatttcttgaaggaaagttctaaggtggtaaagaaggtccccaaaggaacatccagttaccaagctgaatggattttggatggtggcagccaaagtggtggggaaggagatgaatatgaatatgatgatatggaacatgaggattttatggaggaggaatctcaggatgagagtagtgaagaagaggaagaatatgaaactatgactattggggagtctgtgcatgatgatctgtatgataagaaagtagatgaagaagctgaggcaaaaatgttggagaaatataaacaagaaagactggaagagatgtttccagatgaagtggacacgccccgtgatgtggctgctcgaattcgatttcagaaatacagaggccttaagagcttccggacatctccatgggatcctaaggaaaaccttcctcaagattatgctcgaatatttcagtttcagaactttactaacactaggaaaagcatctttaaagaggttgaagaaaaagaggttgaaggagctgaggttggctggtatgtcacacttcatgtctctgaagtccccgtctcagtggtcgagtgcttcaggcaaggaacacccttgattgcattttctttactacctcatgaacagaagatgtcagtattgaatatggtggtgaggcgtgaccctggcaacactgaacctgtgaaagccaaggaggagctcatatttcactgtggattcaggcgcttccgagcctcacctttattctctcagcacactgcagcggacaaacataaattgcagagattcctgactgctgacatggccctggtggcgacagtctatgcgccaatcacttttcctcctgcatctgtgctgcttttcaagcagaaaagcaatggaatgcacagcctcattgctacaggccatcttatgtcagtagatccagacagaatggtcatcaagagagttgttctgagtggtcatcctttcaaaatttttactaagatggcagtagtacgttacatgttcttcaacagagaggatgtgctgtggtttaaaccagtggaactgagaacgaagtggggccggagaggacatatcaaggaacctttaggtacccatggccacatgaaatgcagctttgatgggaagctaaaatctcaagacacagtactgatgaacctgtataaacgagtcttccccaaatggacttatgatccatatgtaccagaaccagtaccctggctgaaaagtgagatttcttcaacagtgcctcaagggggcatggagtaatggattcaaagagattctgtcctaccggtgccagtcagtactccagggatgggaggcacaagttgtgattgggcaaagtttattttctatgtcagcctgtcagtccactgccccattttgcaagacttttttttagccttgacaaaatgtctcagttaagtataaaagtttttccactacttagtccaaaaaaaactattaaatcttaatgaaat

SEQ ID NO: 2229 - protein, 656 aa, Homo sapien
MAKVADTILFLLDPLEGWDSTGDYCLSCLFAQGLPTYTLAVQGISGLPLKKQIDTRKKLSKAVEKRFPHDKLLLLDTQQEAGMLLRQLANQKQQHLAFRDRRAYLFAHAVDFVPSEENNLVGTLKISGYVRGQTLNVNRLLHIVGYGDFQMKQIDAPGDPFPLNPRGIKPQKDPDMAMEICATDAVDDMEEGLKVLMKADPCRQESLQAEVIPDPMEGEQTWPTEEELSEAKDFLKESSKVVKKVPKGTSSYQAEWILDGGSQSGGEGDEYEYDDMEHEDFMEEESQDESSEEEEEYETMTIGESVHDDLYDKKVDEEAEAKMLEKYKQERLEEMFPDEVDTPRDVAARIRFQKYRGLKSFRTSPWDPKENLPQDYARIFQFQNFTNTRKSIFKEVEEKEVEGAEVGWYVTLHVSEVPVSVVECFRQGTPLIAFSLLPHEQKMSVLNMVVRRDPGNTEPVKAKEELIFHCGFRRFRASPLFSQHTAADKHKLQRFLTADMALVATVYAPITFPPASVLLFKQKSNGMHSLIATGHLMSVDPDRMVIKRVVLSGHPFKIFTKMAVVRYMFFNREDVLWFKPVELRTKWGRRGHIKEPLGTHGHMKCSFDGKLKSQDTVLMNLYKRVFPKWTYDPYVPEPVPWLKSEISSTVPQGGME

SEQ ID NO: 2230 - DNA, 2740 bp, Homo sapien
ggcggcggcggcggcggcgaagaactgttccttccacctcttcagccccggcaggacgggggcggccgccgcgaacccggggcggggacagcacgcagcctcgaggcgcgcacccccgcccggcagcggccccgacacccggggcgagcgggaaaacggcaacggcggcggcggcggcggcggcgggggaaggatgcaggggaagaagccgggcggttcgtcgggcggcggccggagcggcgagctgcagggggacgaggcgcagaggaacaagaaaaagaaaaagaaggtgtcctgcttttccaacatcaagatcttcctggtgtccgagtgcgccctgatgctggcgcagggcacggtgggcgcctacctggtgagcgtcctgaccaccctggagcgtaggttcaacctgcagagcgctgacgtgggtgtgatcgctagcagcttcgagatcgggaacctggcgctcatcctcttcgtgagctacttcggggcacgcgggcaccggccgcgcctgatcggctgcggcggcatcgtcatggcgctgggcgcgctgctgtcggcgctgcccgagttcctgacccaccagtacaagtacgaggcgggcgagatccgctggggcgccgagggccgcgacgtctgcgcagccaacggctcgggcggcgacgaggggcccgaccccgacctcatctgccgcaaccggacggctaccaacatgatgtacttgctgctcattggggcccaggtgctcctgggcatcggtgctacccctgtgcagcccctgggcgtctcctactacgacgaccacgtgcggaggaaggactcctcgctctatataggaatcctgttcacgatgctggtatttggaccagcctgcgggtttatcctgggctctttctgtaccaaaatctacgtggatgcggtcttcattgacacaagtaacctggacatcactccggacgacccccgctggatcggagcctggtggggtggctttctgctctgcggtgccttactcttcttctcttccctcttgatgtttgggtttccacagtccctgcccccgcactcagaccccgccatggaaagcgagcaggccatgctctccgaaagagaatacgagagacccaagcccagcaacggggtcctgaggcaccccctggagccagacagcagtgcctcctgtttccagcagctgagagtgatcccgaaggtcaccaagcacctgctctcaaaccctgtgttcacctgcatcatcctggccgcctgcatggagattgcagtggtggctggcttcgctgcctttttggggaagtacctggagcagcagtttaacctcaccacctcttctgccaaccagctgcttgggatgactgcgatcccgtgtgcttgtctgggtatcttcctgggaggtcttttggtgaagaagctcagcctgtctgccctgggggccattcggatggccatgctcgtcaacctggtgtccactgcttgctacgtctccttcctcttcctgggctgcgacactggccctgtggctggggttactgttccctatggaaacagcacagcacctggctcagccctggacccctactcgccctgcaataataactgtgaatgccaaaccgattccttcactccagtgtgtggggcagatggcatcacctacctgtctgcctgctttgctggctgcaacagcacgaatctcacgggctgtgcgtgcctcaccaccgtccctgctgagaacgcaaccgtggttcctggaaaatgccccagtcctgggtgccaagaggccttcctcactttcctctgtgtgatgtgtatctgcagcctgatcggtgccatggcacagacaccctcagtcatcatcctcatcaggacagtcagccctgaactcaagtcttacgctttgggagttctttttctcctccttcgtttgttgggcttcatccctccacccctcatcttcggggctggcatcgactccacctgcctgttctggagcacgttctgtggggagcaaggcgcctgcgtcctctacgacaatgtggtctaccgatacctgtatgtcagcatcgccatcgcgctcaaatccttcgccttcatcctgtacaccaccacgtggcagtgcctgaggaaaaactataaacgctacatcaaaaaccacgagggcgggctgagcaccagtgagttctttgcctctactctgaccctagacaacctggggagggaccctgtgcccgcaaaccagacacataggacaaagtttatctataacctggaagaccatgagtggtgtgaaaacatggagtccgttttatagtgactaaaggagggctgaactctgtattagtaatccaagggtcatttttttcttaaaaaaagaaaaaaaggttccaaaaaaaaccaaaactcagtacacacacacaggcacagatgcacacacacgcagacagacacaccgactttgtcctttttctcagcatcagagccagacaggattcagaataaggagagaatgacatcgtgcggcagggtcctggaggccactcgcgcggctgggccacagagtctactttgaaggcacctcatggttttcaggatgctgacagctgcaagcaacaggcactgccaaattcagggaacagtggtggccagcttggaggatggacatttctggatacacatacacatacaaaacagaaaacattttttaaaagaagtttcctaaaataaa

SEQ ID NO: 2231 - protein, 710 aa, Homo sapien
MQGKKPGGSSGGGRSGELQGDEAQRNKKKKKKVSCFSNIKIFLVSECALMLAQGTVGAYLVSVLTTLERRFNLQSADVGVIASSFEIGNLALILFVSYFGARGHRPRLIGCGGIVMALGALLSALPEFLTHQYKYEAGEIRWGAEGRDVCAANGSGGDEGPDPDLICRNRTATNMMYLLLIGAQVLLGIGATPVQPLGVSYYDDHVRRKDSSLYIGILFTMLVFGPACGFILGSFCTKIYVDAVFIDTSNLDITPDDPRWIGAWWGGFLLCGALLFFSSLLMFGFPQSLPPHSDPAMESEQAMLSEREYERPKPSNGVLRHPLEPDSSASCFQQLRVIPKVTKHLLSNPVFTCIILAACMEIAVVAGFAAFLGKYLEQQFNLTTSSANQLLGMTAIPCACLGIFLGGLLVKKLSLSALGAIRMAMLVNLVSTACYVSFLFLGCDTGPVAGVTVPYGNSTAPGSALDPYSPCNNNCECQTDSFTPVCGADGITYLSACFAGCNSTNLTGCACLTTVPAENATVVPGKCPSPGCQEAFLTFLCVMCICSLIGAMAQTPSVIILIRTVSPELKSYALGVLFLLLRLLGFIPPPLIFGAGIDSTCLFWSTFCGEQGACVLYDNVVYRYLYVSIAIALKSFAFILYTTTWQCLRKNYKRYIKNHEGGLSTSEFFASTLTLDNLGRDPVPANQTHRTKFIYNLEDHEWCENMESVL

SEQ ID NO: 2232 - DNA, 1926 bp, Homo sapien
agagaggggtgcaagatcctgatttttcaggagttcaagcgacaatggcagcccaatacggcagtatgagcttcaaccccagcacaccaggggccagttatgggcctggaaggcaagagcccagaaattcccaattgagaattgtgttagtgggtaaaaccggagcaggaaaaagtgcaacaggaaacagcatccttggccggaaagtgtttcattctggcactgcagcaaaatccattaccaagaagtgtgagaaacgcagcagctcatggaaggaaacagaacttgtcgtagttgacacaccaggcattttcgacacagaggtgcccaatgctgaaacgtccaaggagattattcgctgcattcttctgacctccccagggcctcatgctctgcttctggtggttccactgggccgttacactgaggaagagcacaaagccacagagaagatcctgaaaatgtttggagagagggctagaagtttcatgattctcatattcacccggaaagatgacttaggtgacaccaatttgcatgactacttaagggaagctccagaagacattcaagacttgatggacattttcggtgaccgctactgtgcgttaaacaacaaggcaacaggcgctgagcaggaggcccagagggcacagttgctgggcctgatccagcgcgtggtgagggagaacaaggaaggctgctacactaataggatgtaccaaagggcggaggaggagatccagaagcaaacacaagcaatgcaagaactccacagagtggagctggagagagagaaagcgcggataagagaggagtatgaagagaaaatcagaaagctggaagataaagtggagcaggaaaagagaaagaagcaaatggagaagaaactagcagaacaggaggctcactatgctgtaaggcagcaaagggcaagaacggaagtggagagtaaggatgggatacttgaattaatcatgacagcgttacagattgcttcctttattttgttacgtctgttcgcggaagattaaacttaatgaaaatctgtttgtattttctgcatattctctggcaaccttgccccatacttacttatttagcatagtcgagtgctctagtttctgtctctcaggcactcgtaactaaggaccaccattggccattggtagatgtttgattgacttaacaagagagggacaaattttcaatttgtgaaactccaaagcagaaagtattggtgcttgctaccttgtgaattcttccttagacatgcagagaaaatgtatgcaagagaccaaaaagatggctccaagctatgtcatgttacctgtaataaaatcttttcttctagattctctctatgttggcagataatctccccttgtagcttccactcacttattcttgcattcagagtcacaatgatcatcttacccatgtggtttttgagaaagaaagatcaattctttgtttgcagtgggtaatcttagagatggagatgattgtagaattattcctagatgagtgtcaatttatttaattccattgtcatataaggagtcaaattgtttcttatcatttgttcattgaagaacagagacctgtctggaaaatcgatctctacaaattcaattaaataatgatccccaaatgctgaaaaagtgaaatacagcaattcaacagataatagagcaatgtttagtatattcagctgtatctgtagaaactctttgacgaacctcaatttaaccaatttgatgaatacccagttctcttcttttctagagaaagatagttgcaacctcacctccctcactcaacactttgaatacttattgtttggcaggtcatccacacacttctgcccccactgcattgaattttttgcttatgttgtttataataaaacttttcaattatctc

SEQ ID NO: 2233 - protein, 329 aa, Homo sapien
MAAQYGSMSFNPSTPGASYGPGRQEPRNSQLRIVLVGKTGAGKSATGNSILGRKVFHSGTAAKSITKKCEKRSSSWKETELVVVDTPGIFDTEVPNAETSKEIIRCILLTSPGPHALLLVVPLGRYTEEEHKATEKILKMFGERARSFMILIFTRKDDLGDTNLHDYLREAPEDIQDLMDIFGDRYCALNNKATGAEQEAQRAQLLGLIQRVVRENKEGCYTNRMYQRAEEEIQKQTQAMQELHRVELEREKARIREEYEEKIRKLEDKVEQEKRKKQMEKKLAEQEAHYAVRQQRARTEVESKDGILELIMTALQIASFILLRLFAED

SEQ ID NO: 2234 - DNA, 3257 bp, Homo sapien
ggcatgatgggcacctggagggccgcactcccgttccagccaggctgagccttctgtcccctgcctctggggcctgggaaccccccttcttctttctcctgaatggcacccccgccctagaatccagacaccgagtttcccactgtggctggttcaagggtatgtgagagctccctggtgacagtctgtggctgagcatggccctcccagccctgggcctggacccctggagcctcctgggccttttcctcttccaactgcttcagctgctgctgccgacgacgaccgcggggggaggcgggcaggggcccatgcccagggtcagatactatgcaggggatgaacgtagggcacttagcttcttccaccagaagggcctccaggattttgacactctgctcctgagtggtgatggaaatactctctacgtgggggctcgagaagccattctggccttggatatccaggatccaggggtccccaggctaaagaacatgataccgtggccagccagtgacagaaaaaagagtgaatgtgcctttaagaagaagagcaatgagacacagtgtttcaacttcatccgtgtcctggtttcttacaatgtcacccatctctacacctgcggcaccttcgccttcagccctgcttgtaccttcattgaacttcaagattcctacctgttgcccatctcggaggacaaggtcatggagggaaaaggccaaagcccctttgaccccgctcacaagcatacggctgtcttggtggatgggatgctctattctggtactatgaacaacttcctgggcagtgagcccatcctgatgcgcacactgggatcccagcctgtcctcaagaccgacaacttcctccgctggctgcatcatgacgcctcctttgtggcagccatcccttcgacccaggtcgtctacttcttcttcgaggagacagccagcgagtttgacttctttgagaggctccacacatcgcgggtggctagagtctgcaagaatgacgtgggcggcgaaaagctgctgcagaagaagtggaccaccttcctgaaggcccagctgctctgcacccagccggggcagctgcccttcaacgtcatccgccacgcggtcctgctccccgccgattctcccacagctccccacatctacgcagtcttcacctcccagtggcaggttggcgggaccaggagctctgcggtttgtgccttctctctcttggacattgaacgtgtctttaaggggaaatacaaagagttgaacaaagaaacttcacgctggactacttataggggccctgagaccaacccccggccaggcagttgctcagtgggcccctcctctgataaggccctgaccttcatgaaggaccatttcctgatggatgagcaagtggtggggacgcccctgctggtgaaatctggcgtggagtatacacggcttgcagtggagacagcccagggccttgatgggcacagccatcttgtcatgtacctgggaaccaccacagggtcgctccacaaggctgtggtaagtggggacagcagtgctcatctggtggaagagattcagctgttccctgaccctgaacctgttcgcaacctgcagctggcccccacccagggtgcagtgtttgtaggcttctcaggaggtgtctggagggtgccccgagccaactgtagtgtctatgagagctgtgtggactgtgtccttgcccgggacccccactgtgcctgggaccctgagtcccgaacctgttgcctcctgtctgcccccaacctgaactcctggaagcaggacatggagcgggggaacccagagtgggcatgtgccagtggccccatgagcaggagccttcggcctcagagccgcccgcaaatcattaaagaagtcctggctgtccctaactccatcctggagctcccctgcccccacctgtcagccttggcctcttattattggagtcatggcccagcagcagtcccagaagcctcttccactgtctacaatggctccctcttgctgatagtgcaggatggagttgggggtctctaccagtgctgggcaactgagaatggcttttcataccctgtgatctcctactgggtggacagccaggaccagaccctggccctggatcctgaactggcaggcatcccccgggagcatgtgaaggtcccgttgaccagggtcagtggtggggccgccctggctgcccagcagtcctactggccccactttgtcactgtcactgtcctctttgccttagtgctttcaggagccctcatcatcctcgtggcctccccattgagagcactccgggctcggggcaaggttcagggctgtgagaccctgcgccctggggagaaggccccgttaagcagagagcaacacctccagtctcccaaggaatgcaggacctctgccagtgatgtggacgctgacaacaactgcctaggcactgaggtagcttaaactctaggcacaggccggggctgcggtgcaggcacctggccatgctggctgggcggcccaagcacagccctgactaggatgacagcagcacaaaagaccacctttctcccctgagaggagcttctgctactctgcatcactgatgacactcagcagggtgatgcacagcagtctgcctcccctatgggactcccttctaccaagcacatgagctctctaacagggtgggggctacccccagacctgctcctacactgatattgaagaacctggagaggatccttcagttctggccattccagggaccctccagaaacacagtgtttcaagagaccctaaaaaacctgcctgtcccaggaccctatggtaatgaacaccaaacatctaaacaatcatatgctaacatgccactcctggaaactccactctgaagctgccgctttggacaccaacactcccttctcccagggtcatgcagggatctgctccctcctgcttcccttaccagtcgtgcaccgctgactcccaggaagtctttcctgaagtctgaccacctttcttcttgcttcagttggggcagactctgatcccttctgccctggcagaatggcaggggtaatctgagccttcttcactcctttaccctagctgaccccttcacctctccccctcccttttcctttgttttgggattcagaaaactgcttgtcagagactgtttattttttattaaaaatataaggcttaaaaaaaaaaaaaaaaaaaaaaaaaaaa

SEQ ID NO: 2235 - protein, 761 aa, Homo sapien
MALPALGLDPWSLLGLFLFQLLQLLLPTTTAGGGGQGPMPRVRYYAGDERRALSFFHQKGLQDFDTLLLSGDGNTLYVGAREAILALDIQDPGVPRLKNMIPWPASDRKKSECAFKKKSNETQCFNFIRVLVSYNVTHLYTCGTFAFSPACTFIELQDSYLLPISEDKVMEGKGQSPFDPAHKHTAVLVDGMLYSGTMNNFLGSEPILMRTLGSQPVLKTDNFLRWLHHDASFVAAIPSTQVVYFFFEETASEFDFFERLHTSRVARVCKNDVGGEKLLQKKWTTFLKAQLLCTQPGQLPFNVIRHAVLLPADSPTAPHIYAVFTSQWQVGGTRSSAVCAFSLLDIERVFKGKYKELNKETSRWTTYRGPETNPRPGSCSVGPSSDKALTFMKDHFLMDEQVVGTPLLVKSGVEYTRLAVETAQGLDGHSHLVMYLGTTTGSLHKAVVSGDSSAHLVEEIQLFPDPEPVRNLQLAPTQGAVFVGFSGGVWRVPRANCSVYESCVDCVLARDPHCAWDPESRTCCLLSAPNLNSWKQDMERGNPEWACASGPMSRSLRPQSRPQIIKEVLAVPNSILELPCPHLSALASYYWSHGPAAVPEASSTVYNGSLLLIVQDGVGGLYQCWATENGFSYPVISYWVDSQDQTLALDPELAGIPREHVKVPLTRVSGGAALAAQQSYWPHFVTVTVLFALVLSGALIILVASPLRALRARGKVQGCETLRPGEKAPLSREQHLQSPKECRTSASDVDADNNCLGTEVA

SEQ ID NO: 2236 - DNA, 2532 bp, Homo sapien
gtgcatgagggggctgctccggagcgacggcggctgcagctggagccaggcgctcgcccgtccgccggttggctcgccgggacctcgcgcaccggcggcagagtcccttgcgtggattggcaagcgacgccccacctgccccgagctcaccattttctttcgcgctggctgcagctgacccggcgaagggagccgaccgggccctgggctggaggtaaaaccccacggaaagaacatgaggttcccttggaaatcattcaagaggaagatggaaggggctgtttagaagagcttaaaagctacaggctgtaagactggggcctgagtgctggcagtggaaaacactgttgggctgtgatctctccctgaaaagttccaggtgcctttttgcttcctgcaaaagaaaggaagcgaaagagaagaccatgtccatagccctgaagcaggtattcaacaaggacaagaccttccgacccaagaggaaatttgaacctggcacacagaggtttgagctgcacaaacgggctcaggcatccctcaactcgggtgtggacctgaaggcggctgtgcagttgcccagtggggaggaccagaatgactgggtggcagtacatgtggtggacttcttcaatcggatcaacctcatctatggcaccatctgtgagttctgcaccgagcggacctgtcctgtgatgtcagggggccccaaatatgagtatcggtggcaggatgatctcaagtataagaagccaacagcgctgccagctccccagtacatgaaccttcttatggattggattgaggttcagatcaacaacgaggaaatatttccaacatgcgtgggtgttcccttcccaaagaacttccttcagatctgcaagaagatcctgtgccgccttttccgggtctttgtccacgtctatatccaccacttcgaccgggtcattgtgatgggtgcagaggcccatgtcaacacctgctacaaacacttctattactttgtcacagagatgaacctcatagaccgcaaggagctagagcctttgaaagaaatgacgagcaggatgtgtcactaatgctccacctcaccctttggaagaaaggaaagctgtttcctcctggtgccctgagcgggcaggaggtggaccaccctggctgaaatgacacacctactcccaggaacagcagaggtggaggcaagcagtgactcctgagagacattccccactcactttgtgtgctcttaaccttctgagtgctgctagcccagacctgtggacgaggcagaccacaacgtgaaagaaggaccagccccttgaccgttctggctggggaattgtccacgaggaagcctctgcgcttccacacatggcacagttctgcctgtgacctgccgcctaagctttactggaattcaggttttgagactgagatgcgtgttcgtatttttccacttatctgtcttgtcagctggccgacttctctgtgattggttttttaagtgccgggtgaattttggacctctggatgtgcagcaagtttttatgcaataagccttcctttcaggtctctaaaagctcctgctctgatctgtggtttaacactgtgcagggctgtggagctctgagagacctgaacccctacccatcccctgcacctccctactctccctgccgaggcgtccatagcatttccctaataaatagttttatcagggacactccatggggtggcttgtctctgccccaaacagggtcttcacgttctaactgcagggaagagactggttactagcgtaaagctgacaagttaccagttcacctgatcagaatgtattttttataaccaccatcattccttgtctcttcagtggaagatattctttcctgtttcccagaagagagaaataaaagtcctaaataactaagaatgatcagcgggagcgttgggcatgattactgcagtgtttgttctttattaaagacagggagtcgtggctgtctctacataatactaacatttcagtgaaaaaagtacagttggttatttggtacgtgtagatttaacacccagacggctgacttgtaaccctccccactagccttctgagcatttaaacccagccgtcattctctccccactccacgctccccactcctctgccacgttatgttacggcacaaaattaatttctgcccctgtgattgggccacggttgccaaggtaacagtggagctggagctaacttccttctttcatcctttccaatttttctattccagaagacagtcagaataatgcattctgtactacatcctgccttttgaaacctaaatgagttttcgttgatgaaatgttgccttctctgattcattcacaaaactgtggtggttctgaccacctgtgacgaggggggtcataatacttccagtgatccttttaatttagcaaaatatttgtcggtggagggaagtagataagaatgtattagtgtattttaaagtaataatgattaaagaataactaaatgac

SEQ ID NO: 2237 - protein, 216 aa, Homo sapien
MSIALKQVFNKDKTFRPKRKFEPGTQRFELHKRAQASLNSGVDLKAAVQLPSGEDQNDWVAVHVVDFFNRINLIYGTICEFCTERTCPVMSGGPKYEYRWQDDLKYKKPTALPAPQYMNLLMDWIEVQINNEEIFPTCVGVPFPKNFLQICKKILCRLFRVFVHVYIHHFDRVIVMGAEAHVNTCYKHFYYFVTEMNLIDRKELEPLKEMTSRMCH

SEQ ID NO: 2238 - DNA, 2806 bp, Homo sapien
ggcacgaggctctggtggctagcctgtcctgacaggggagagttaagctcccgttctccaccgtgccggctggccaggtgggctgagggtgaccgagagaccagaacctgcttgctggagcttagtgctcagagctggggagggaggttccgccgctcctctgctgtcagcgccggcagcccctcccggcttcacttcctcccgcagcccctgctactgagaagctccgggatcccagcagccgccacgccctggcctcagcctgcggggctccagtcaggccaacaccgacgcgcagctgggaggaagacaggacccttgacatctccatctgcacagaggtcctggctggaccgagcagcctcctcctcctaggatgacctcaccctccagctctccagttttcaggttggagacattagatggaggccaagaagatggctctgaggcggacagaggaaagctggattttgggagcgggctgcctcccatggagtcacagttccagggcgaggaccggaaattcgcccctcagataagagtcaacctcaactaccgaaagggaacaggtgccagtcagccggatccaaaccgatttgaccgagatcggctcttcaatgcggtctcccggggtgtccccgaggatctggctggacttccagagtacctgagcaagaccagcaagtacctcaccgactcggaatacacagagggctccacaggtaagacgtgcctgatgaaggctgtgctgaaccttaaggacggagtcaatgcctgcattctgccactgctgcagatcgacagggactctggcaatcctcagcccctggtaaatgcccagtgcacagatgactattaccgaggccacagcgctctgcacatcgccattgagaagaggagtctgcagtgtgtgaagctcctggtggagaatggggccaatgtgcatgcccgggcctgcggccgcttcttccagaagggccaagggacttgcttttatttcggtgagctacccctctctttggccgcttgcaccaagcagtgggatgtggtaagctacctcctggagaacccacaccagcccgccagcctgcaggccactgactcccagggcaacacagtcctgcatgccctagtgatgatctcggacaactcagctgagaacattgcactggtgaccagcatgtatgatgggctcctccaagctggggcccgcctctgccctaccgtgcagcttgaggacatccgcaacctgcaggatctcacgcctctgaagctggccgccaaggagggcaagatcgagattttcaggcacatcctgcagcgggagttttcaggactgagccacctttcccgaaagttcaccgagtggtgctatgggcctgtccgggtgtcgctgtatgacctggcttctgtggacagctgtgaggagaactcagtgctggagatcattgcctttcattgcaagagcccgcaccgacaccgaatggtcgttttggagcccctgaacaaactgctgcaggcgaaatgggatctgctcatccccaagttcttcttaaacttcctgtgtaatctgatctacatgttcatcttcaccgctgttgcctaccatcagcctaccctgaagaagcaggccgcccctcacctgaaagcggaggttggaaactccatgctgctgacgggccacatccttatcctgctaggggggatctacctcctcgtgggccagctgtggtacttctggcggcgccacgtgttcatctggatctcgttcatagacagctactttgaaatcctcttcctgttccaggccctgctcacagtggtgtcccaggtgctgtgtttcctggccatcgagtggtacctgcccctgcttgtgtctgcgctggtgctgggctggctgaacctgctttactatacacgtggcttccagcacacaggcatctacagtgtcatgatccagaaggtcatcctgcgggacctgctgcgcttccttctgatctacttagtcttccttttcggcttcgctgtagccctggtgagcctgagccaggaggcttggcgccccgaagctcctacaggccccaatgccacagagtcagtgcagcccatggagggacaggaggacgagggcaacggggcccagtacaggggtatcctggaagcctccttggagctcttcaaattcaccatcggcatgggcgagctggccttccaggagcagctgcacttccgcggcatggtgctgctgctgctgctggcctacgtgctgctcacctacatcctgctgctcaacatgctcatcgccctcatgagcgagaccgtcaacagtgtcgccactgacagctggagcatctggaagctgcagaaagccatctctgtcctggagatggagaatggctattggtggtgcaggaagaagcagcgggcaggtgtgatgctgaccgttggcactaagccagatggcagccccgatgagcgctggtgcttcagggtggaggaggtgaactgggcttcatgggagcagacgctgcctacgctgtgtgaggacccgtcaggggcaggtgtccctcgaactctcgagaaccctgtcctggcttcccctcccaaggaggatgaggatggtgcctctgaggaaaactatgtgcccgtccagctcctccagtccaactgatggcccagatgcagcaggaggccagaggacagagcagaggatctttccaaccacatctgctggctctggggtcccagtgaattctggtggcaaatatatattttcactaactaaaaaaaaaaaaaaaaaaaaaaa

SEQ ID NO: 2239 - protein, 764 aa, Homo sapien
MTSPSSSPVFRLETLDGGQEDGSEADRGKLDFGSGLPPMESQFQGEDRKFAPQIRVNLNYRKGTGASQPDPNRFDRDRLFNAVSRGVPEDLAGLPEYLSKTSKYLTDSEYTEGSTGKTCLMKAVLNLKDGVNACILPLLQIDRDSGNPQPLVNAQCTDDYYRGHSALHIAIEKRSLQCVKLLVENGANVHARACGRFFQKGQGTCFYFGELPLSLAACTKQWDVVSYLLENPHQPASLQATDSQGNTVLHALVMISDNSAENIALVTSMYDGLLQAGARLCPTVQLEDIRNLQDLTPLKLAAKEGKIEIFRHILQREFSGLSHLSRKFTEWCYGPVRVSLYDLASVDSCEENSVLEIIAFHCKSPHRHRMVVLEPLNKLLQAKWDLLIPKFFLNFLCNLIYMFIFTAVAYHQPTLKKQAAPHLKAEVGNSMLLTGHILILLGGIYLLVGQLWYFWRRHVFIWISFIDSYFEILFLFQALLTVVSQVLCFLAIEWYLPLLVSALVLGWLNLLYYTRGFQHTGIYSVMIQKVILRDLLRFLLIYLVFLFGFAVALVSLSQEAWRPEAPTGPNATESVQPMEGQEDEGNGAQYRGILEASLELFKFTIGMGELAFQEQLHFRGMVLLLLLAYVLLTYILLLNMLIALMSETVNSVATDSWSIWKLQKAISVLEMENGYWWCRKKQRAGVMLTVGTKPDGSPDERWCFRVEEVNWASWEQTLPTLCEDPSGAGVPRTLENPVLASPPKEDEDGASEENYVPVQLLQSN

SEQ ID NO: 2240 - DNA, 2950 bp, Homo sapien
gcaggctgctgtctcacagagcgagaaggtgtcaggagcagcccagttgtgtctctctctctacctctgtgaagggcgcgaatgggcagagcagaacttctagaagggaagatgagcacccaggatccctcagatctgtggagcagatccgatggagaggctgagctgctccaggacttggggtggtatcacggcaacctcacacgccatgctgctgaagctcttctcctctcaaatggatgtgacggcagctaccttctgagggacagcaatgagaccaccgggctgtactctctctctgtgagggccaaagattctgttaaacactttcatgttgaatatactggatattcatttaaatttggctttaatgaattctcatctttgaaggattttgtcaagcattttgcaaatcagcctttgattggaagcgagacaggcactctgatggttctaaaacatccctacccaagaaaagtggaagaaccctccatttatgaatctgtccgggttcacacagcaatgcagacaggaagaacagaagatgaccttgtgcccacagcaccttctctgggcaccaaagaaggttacctcaccaaacagggaggcctggtcaagacctggaaaacaagatggtttactctgcacaggaatgaactgaaatacttcaaagaccagatgtcaccagaaccaattcggatcctagacctaacagaatgttcagctgtacaattcgattattcacaagaaagggtaaactgtttttgtttggtatttccattcaggacattttatctctgtgcaaagaccggagtagaagctgatgagtggatcaagatattacgctggaaattggtcaaggacaaaagctgtattttgtctgctctctgtatatctcccgaggagaagactgatcacaaataagaaaacagctcaaccaaggggaaggcacgatccgatctcggtcgttcatctttaaatagatctttcttgccaaggaatgctctggcccaggagcaaggtggaatgtttccctgacgctgtgatctgcagcaggcttcaaatgaaaaccgactaaggattttctttcaaaaacaaatcagaagcagatgctgattgggacccatataccacgttgctgactcacgttgctgcccttccatgatgttgccatctccttgagaacactgaagcaatcaccattctgatagaaagtgcttaaaccaccactcttaggtctgctcactcttagaacacacaatggaagaggaagggtttttgttttcactcattgtggtccccaagcctattgacactagttgcctagagtcccactgtgagtcatggtcagcctgtctgacatccaggttgtgctattaaccaagaaggaaacagatacttggaggcttagatgacttctgcaggatttatattcagatagaaaacatcaaatattttcaggggagaggtttttttttttaatttttccccctttatacaaaaaaaaagaacatttccaaaactaaaatagaaaatgcttgtggcatttattttctctttttaaaaggttcagaaatttggcaggtcctttgcttctaatgacaaaactgtgagagctagatgtcctatgggcaattaggtagtataataaaggtaaatgaaggtacaatttttaaaccattattttcaccctgttggggtaaatgttttaaagagtgagaaaacataaattgagaaagggtgataaagtaatagataacttttagtttaataataattattgttattatactactaataatagagcacttgtaagcactaagttatctttatccaacatttctccaaatggactgaaagaaacttttcaaggacagtgtattataacaatccctttcccagaattagttgtatagggttggcccaagagatgtaagaaaaatctcgcattgctccctaagcaccctgggccttattaaagagcaacttctatttccagtcgggggagtaacactaaagctacaagaaatatgtaataatgataggtaataatgtgttccaaagctttttcaaactagaataaggaggcaaatagaagaatgagatactgatgtccacagttcattggcagaatctaaccccttctgttatcttttttaatactatttttgtttagatagaagtttcaaagaagataaaaatgcttgaagagcctgagagtaaaaagattatgctgcaaagctatgatataaactgctcttgcagtccaaagggatacctgattaaagaagtttcttatttaaacatctcagacgcaaaaattacattaaatttttgtatatttcaacaacattttaaatgtattttgttatgtttgtattatataggataaagcaaatgtcaagttaaaatgtattgtgttgtttgtaaagtaagaagttactggccaggagcggcggctcatgcctgtaatcccaggactttggtaggccaagacaagcagatcacttgaggtcaggagttcaacatcagcctggccaacatgatgaaaccttgtctttactaaaaatacaaaaattagctgggcatggtggcaggcgcctgtaatcccagctactcaggaggctgaggcaggagaattgcttgaacccgggaggtggaggttgcagtgaaccaagatcgcggcgctgcactctagcctgggtgacagagtcagactccgtcccaaaaaaacaaacaaacaaaacaaaacaaaaaaaacagaagttacaaatgaatactcacggatatgtatagttttatgtttgttttcttagaaacaaatgtgtttctttgggtgggtaatattgtgttttactatgtttaccttttataaaacataacctgtttatttatattctttggctttgtttattaaaaagcatgattttgctgtgcatgtaccattttg

SEQ ID NO: 2241 - protein, 280 aa, Homo sapien
MGRAELLEGKMSTQDPSDLWSRSDGEAELLQDLGWYHGNLTRHAAEALLLSNGCDGSYLLRDSNETTGLYSLSVRAKDSVKHFHVEYTGYSFKFGFNEFSSLKDFVKHFANQPLIGSETGTLMVLKHPYPRKVEEPSIYESVRVHTAMQTGRTEDDLVPTAPSLGTKEGYLTKQGGLVKTWKTRWFTLHRNELKYFKDQMSPEPIRILDLTECSAVQFDYSQERVNCFCLVFPFRTFYLCAKTGVEADEWIKILRWKLVKDKSCILSALCISPEEKTDHK

SEQ ID NO: 2242 - DNA, 3614 bp, Homo sapien
aaggagagaacttttcctgcacaaggaacgcctcgtggggagacccaaggcaggagcggtccggagccggctgcggcgtgtgcggccggccttgggacagcgatcgccgcgggtggcaacagagagccccaagcaaaagtgggagcaggagcttggaggtgagcacaggaagccccacttgaggcttttacgcagcctctagtctctgtttcttctggaataggcaagcgtcctttcaactctaagagaccagcagaggccactgtcccttaagactgccggagtcctcaccacttctccaggattccagaggagactgtggcgatggtgaatgaaggtcccaaccaggaagagagcgatgacacccctgcgccggagtccgcactccaagcggaccccagcgtctcggtccatcccagcgtctcggtccatcccagcgtctccatcaaccccagcgtctctgtccaccccagcagttcggcccaccccagtgccttagcccaacccagtggcttggctcaccccagtagctcgggccctgaggacctcagcgtgatcaaggtgagcaggcgccgttgggccgtggtcctggtgtttagctgctactccatgtgcaactcctttcagtggatccagtacggctccatcaataacatcttcatgcacttctacggtgtcagtgcctttgccattgactggctgtccatgtgctacatgctgacttacatccctctgctcctgccagtggcttggctgctggagaagttcggcctgcgcaccattgctctcactggctcggctctcaactgcctgggggcctgggtgaagctgggcagcctgaagccgcatctctttccggtcaccgtagtgggccagctcatctgctctgtggcccaggttttcatcctgggcatgccctcccgcatcgcttccgtctggttcggggctaatgaggtttcaacagcctgctcggtggctgtctttggcaatcagcttggaattgcgattgggttcttggtccctcctgttttggtacccaacattgaagaccgggacgagcttgcctaccacatcagcatcatgttctatataataggaggtgtggccactctcctcctcatccttgtcatcattgtgttcaaggagaaacctaaatatccccccagcagggcccaatccctgagctatgccttgacctctcctgatgcctcatacttaggttccatcgcccggctcttcaaaaatctcaactttgtgctgcttgtcatcacctatggtctgaatgctggtgctttttatgccttgtccactcttctgaatcgcatggtgatctggcactacccgggggaagaagtgaatgctggaagaattggcctgacgatcgtcattgcaggaatgcttggggctgtgatctcaggaatctggctggataggtccaaaacctacaaagagacaaccctggtagtctatatcatgacactggtgggcatggtggtgtacacgtttaccttgaacctgggacacctgtgggtagtgttcatcactgctggcacaatgggcttctttatgactggctatctcccactgggatttgagtttgctgtggagctcacgtacccagaatcagaaggcatctccttcggcctcctcaacatatctgcacaggtatttgggatcatctttaccatctcccagggccagattattgacaactatggaaccaagcctgggaacatcttcctgtgtgtgttccttactcttggagcagccctcactgcattcattaaggcagatctccggagacagaaagcaaacaaagaaactcttgagaacaaactccaagaggaggaggaggagagcaacaccagcaaagtgcccactgctgtgtcagaggatcatctctgagaggaaggtggtgacaactcagggaacacgaacaccccaccttttccttcagcacagctctcaccgccagcacaaagggcttcgctagagatgtttttggagggaatcagtgggactatttgtggcatggatggcctattcctcctagaacccacgtaagagcttggatgatttagttggagaaaattgcacctatcaccaaatgcaaatttgattcccacctccacccccttttaggttatgggagttggtgttgggacagggtggcagagaatattggagtcaatcctagcttggtctcttgccttccctcttttcctccatccatcgtggacaatgcctgcaaaattttcacaggaagaaagcctattcaggatattaacttgaaatttccagtgtcctaagagcctctcatgaagcccagttctaataagtggcaagctgctctgccggggtcatctcctgggtcatcggactgattgctcaagttctgcaggagaggaagcaccattagaacaactccatcagaacagctccaccgggacttgtgggcctaaattttcctggcctaacgggtctgtctccaaaccctctttcctaagagctgagcaaaccaaccataataaacttgacaaaagactttgttgtggccatgacagagataccgactcaggagggctacctacctaggtgtgatcatgctgggggctaccttctgagtatatttgtgaaagcacatatttgggaactctggtagcttgagttgggaatgggaaggttcttttttacagaagtacttccccagggacttctgtgtgtcacagtcacctctgatgcctttatcttgatgttgcattgggaatctcagccatcagcccaagtgcttgttttattccaaggcagggtaatccccgtcaacttactctaacctttgctgaaaactaatcttgattcattctactctgaaaatccaaaggtgcttctgagagataagagggaaggggtagaaggaaaggtgccccttgaaatgggaattgagcctgttagaattaaaagcttatctcacctctgctggggacagtatttgcaccaccaacccctctcctcacctgctttgagcgataatctttatcagatattctaaacttaaagggattccctttaaaccaactcaagctgatctttcctatctagcctgctgtttggctgtactcatgggctttggtaatatctcctaaaaatgaggttttggtaatttttcctatgcattgggcaactgtgatcgtgaccactgtgctgtcttgctccagccactgccctggcctcagcatatcagggcagcctgtgctggctgcaatactgtggtgcttgggccactgcctgagaggagccaggtttgtgtgtgtctgcatgtgtgtgtgtgtgtgtttgtacagattcaagcaatggatgcaaggaacatgctgtatgtaatagaagaaagaagtccacgttttcggcagaagtagtgagtcagtgtggaagagaggtgagggtgtgctttactttttgataaagagaaagatgtttactcataaacccttcaaaaggtattaacaaatgtttaccaaacctattgctttattttaaaaacataatttgtgttttctatttgtaagatctgacatttcgaggccaataaaaacttctcagaaaaaaaaaaaaaaaaa

SEQ ID NO: 2243 - protein, 526 aa, Homo sapien
MVNEGPNQEESDDTPAPESALQADPSVSVHPSVSVHPSVSINPSVSVHPSSSAHPSALAQPSGLAHPSSSGPEDLSVIKVSRRRWAVVLVFSCYSMCNSFQWIQYGSINNIFMHFYGVSAFAIDWLSMCYMLTYIPLLLPVAWLLEKFGLRTIALTGSALNCLGAWVKLGSLKPHLFPVTVVGQLICSVAQVFILGMPSRIASVWFGANEVSTACSVAVFGNQLGIAIGFLVPPVLVPNIEDRDELAYHISIMFYIIGGVATLLLILVIIVFKEKPKYPPSRAQSLSYALTSPDASYLGSIARLFKNLNFVLLVITYGLNAGAFYALSTLLNRMVIWHYPGEEVNAGRIGLTIVIAGMLGAVISGIWLDRSKTYKETTLVVYIMTLVGMVVYTFTLNLGHLWVVFITAGTMGFFMTGYLPLGFEFAVELTYPESEGISFGLLNISAQVFGIIFTISQGQIIDNYGTKPGNIFLCVFLTLGAALTAFIKADLRRQKANKETLENKLQEEEEESNTSKVPTAVSEDHL

SEQ ID NO: 2244 - DNA, 1197 bp, Homo sapien
atgagtgttggacgtcgaagaataaagttgttgttgggtatcctgatgatggcaaatgtcttcatttattttattatggaagtctccaaaagcagtagccaagaaaaaaatggaaaaggggaagtaataatacccaaagagaagttctggaagatatctacccctcccgaggcatactggaaccgagagcaagagaagctgaaccggcagtacaaccccatcctgagcatgctgaccaaccagacgggggaggcgggcaggctctccaatataagccatctgaactactgcgaacctgacctgagggtcacgtcggtggttacgggttttaacaacttgccggacagatttaaagactttctgctgtatttgagatgccgcaattattcactgcttatagatcagccggataagtgtgcaaagaaacctttcttgttgctggcgattaagtccctcactccacattttgccagaaggcaagcaatccgggaatcctggggccaagaaagcaacgcagggaaccaaacggtggtgcgagtcttcctgctgggccagacacccccagaggacaaccaccccgacctttcagatatgctgaaatttgagagtgagaagcaccaagacattcttatgtggaactacagagacactttcttcaacttgtctctgaaggaagtgctgtttctcaggtgggtaagtacttcctgcccagacactgagtttgttttcaagggcgatgacgatgtttttgtgaacacccatcacatcctgaattacttgaatagtttatccaagaccaaagccaaagatctcttcataggtgatgtgatccacaatgctggacctcatcgggataagaagctgaagtactacatcccagaagttgtttactctggcctctacccaccctatgcagggggaggggggttcctctactccggccacctggccctgaggctgtaccatatcactgaccaggtccatctctaccccattgatgacgtttatactggaatgtgccttcagaaactcggcctcgttccagagaaacacaaaggcttcaggacatttgatatcgaggagaaaaacaaaaataacatctgctcctatgtagatctgatgttagtacatagtagaaaacctcaagagatgattgatatttggtctcagttgcagagtgctcatttaaaatgctaa

SEQ ID NO: 2245 - protein, 398 aa, Homo sapien
MSVGRRRIKLLLGILMMANVFIYFIMEVSKSSSQEKNGKGEVIIPKEKFWKISTPPEAYWNREQEKLNRQYNPILSMLTNQTGEAGRLSNISHLNYCEPDLRVTSVVTGFNNLPDRFKDFLLYLRCRNYSLLIDQPDKCAKKPFLLLAIKSLTPHFARRQAIRESWGQESNAGNQTVVRVFLLGQTPPEDNHPDLSDMLKFESEKHQDILMWNYRDTFFNLSLKEVLFLRWVSTSCPDTEFVFKGDDDVFVNTHHILNYLNSLSKTKAKDLFIGDVIHNAGPHRDKKLKYYIPEVVYSGLYPPYAGGGGFLYSGHLALRLYHITDQVHLYPIDDVYTGMCLQKLGLVPEKHKGFRTFDIEEKNKNNICSYVDLMLVHSRKPQEMIDIWSQLQSAHLKC

SEQ ID NO: 2246 - DNA, 4824 bp, Homo sapien
gtttgaggccggccagtcgtgactgggcggcaatgaggtcagtgactgccgggagtcctgcaggggcggggcggcgccaagcgcagggagcccggctgagtggcagccyagattgaagatggatacgtgacaatcccagggaccgctgcactgacttcatttccttagacaagacacagtgtagggcccggcccgygttggccccaggactcctttggaatatagctgtggacaatgaatcctgcgagcgatgggggcacatcagagagcatttttgacctggactatgcatcctgggggatccgctccacgctgatggtcgcyggctttgtcttctacttgggcgtctttgtggtctgccaccagctgtcctcttccctgaatgccacttaccgttctttggtggccagagagaaggtcttctgggacctggcggccacgcgtgcagtctttggtgttcagagcacagccgcaggcctgtgggctctgctgggggaccctgtgctgcatgccgacaaggcgcgtggccagcagaactggtgctggtttcacatcacgacagcaacgggattcttttgctttgaaaatgttgcagtccacctgtccaacttgatcttccggacatttgacttgtttctggttatccaccatctctttgcctttcttgggtttcttggctgcttggtcaatctccaagttggccactatctagctatgaccacgttgctcctggagatgagtacgccctttacctgcgtttcctggatgctcttaaaggcgggctggtccgagtctctgttttggaagctcaaccagtggctgatgattcacatgtttcactgccgcatggttctaacctaccacatgtggtgggtgtgtttctggcactgggacggcctggtcagcaacctgtatctgcctcatttgacactgttccttgtcggactggctctgcttacgctaatcattaatccatattggacccataagaagactcagcagcttctcaatccggtggactggaacttcgcacagccagaagccaagagcaggccagaaggcaacgggcagctgctgcggaagaagaggccatagctgctccagccggggctccggggcggcagcagagctggcacaccgattctgggaagccccgcgaatgatggcttttgaattaatgaggcagtgaatgttttgtgtttacttctaagggaaatactaactttctttcgcattagtattaattttgaagtagctacaaagtatttttaagaaattataattttatgactgtctggcaggctctgtcagtttagccgcgccggaccgtgtcaagcatctaggagaggagtccatggtgtccaggcatcggggcgtcacacctgttgaggagtggggtggctttgaatgctggaaatggcttcatagtgaagtgcctcccacagggcgggtgggtcagcgttgactctttccarctgcacactcatatgccgtgtgtcttattcagaagtcacattcttttcagttggagagaattgggctaagatagaaaataacatgatttgttccttattaaagtttcccagcgtatgaaattctaagctgggtggggtggctcacgcccgacgtaatcccagcacgttgggaggccgaggcaggtggatcacttgaggccaggagttcgagaccagcctggtcaagatggtgaaaccccatctctactaaaattacaaaaattagccgggtgtcgtggcacacacctgtaatcccagctatttgggaggccaaggcaggagaattgcctgaacccgggaggcggaggttgcagtgagctgagatcgcaccactgcactccagcactccagcctgggtgacagagcaagactctctctcataaaaaaaaaaaaaaaaaaaattctagaccgaagtgtacggcagtgccatctggtggcaagtggtacaaagacaacgctgaggggtagtgactcctgtagcagcagagacgccttggagtttaacccccaccaaccagagcgtgggctggtaaagatgaaatcttgcaagttttttttttttttaaatcatggtacctgttttaaaatgagaagttattattcatactgtgttgctcatttgacaaaataaggtaaggatttcataatcaggttgtctgggtttcagagctgtttttaattgactgagttacctacaggcacccaatctagaccctaattctgtggttggtgttcctctgtagatttcaagacaagtagtgatgtcattttctccctgagctgtagggtggacctggacccctcagagatgctcgactgcagggtcctggggtccctagagtggtcctgcagcagcccctggcaatgagctgcctgatgatgagtcccaaggtacattgttctactgttttatacccaggtagaagttacacagcaatttagcaatgttgttaacagacatacagaattgtgtgtgtgtgtgtgtgtgtgtgtgtgtgtgtgagtgttttgatataaacgtgcaattaaaattcaaagtttattttttatcacaagcacctttgaaatgtacgtggaaaacgtcggctgctcgtgagaatcatgtgtgacttacgttccttatgttttatggaactctcggaacagtgttttgtttttgtttagtttttgttttcgtttttttgrgacggagcctggctttggctcccaggctggagtccagtggtgtgatctcggctcactgcaacctccacctcccgggttccagggattctcctgcctcaccctttcaagtagctgggattrcaggtacctctaccatgcctggctgattttttgtatttttagtagagacagggtttcaccatgttggccaggctggtctctgactcctgactaaaagtgatctgcccacctcggcctcccaaagttctgggattacgggcgtgagccacttcacccggcccggagcggtgtattttgattgctggtgctttaactatattgaccaaggtgtatagtaacctatttatcacattttacgaagcaattttaatcttaaacacatccagcaaatggtgtccctgctgaaacttttaactggaaacctcacacctggcaggcagcactctctgcagccgtgcccttgtggagtcagcaggagctggtgtttttcagccagacagaggcataataaagtgactgatgtttacrgaacccaaatgatgtcttcctctctctcaaaataaactaacctattcatattgctgtgaatgctttatcttggagatagaaaatataatgataaattcatcatgtgttcagaattcgatttggagttggaagtggacagcctaatttttatctcacctccactaggactttgaccttcccaggggtccacactttacctcctgtatcttcatacgcgtgtgtggatgcatagagatggaggtgctgtagagaagcacaggctcacccgctccgtccagtgtcacccacacattggtccggggacccctcagtgcagagcctgaagttgggggtttaggggtggaaaaggcttcgtgaaatgttaatgatgcgtacaccttccagatggcacagcactttcccatggtcctcrctggcctcagtctccctgaccggcagtgtgaggggatgtagctatagtggagcatggtacaagcgacattcatgagctctgacttcttggtgccaggttggtgtgagcctgggcccggcccactcagcggcccacattggccagcattcagctgcacgtgtgtgctgcgtgcttcacatcctctattgagagttacagcaagtgttaaacgaggtgagttyacataacaggaattctggaactgcttgaaaactaggacgattgggcaatatcggccttaactccacctgatggcaggtgacccggatagaaaatggccctgcgtttagccaggatgtggctctccagcttggcttcagtgtgatcacttgtcagtgcgctttctctttcgatagtgaaatccttctctatacctatgttttgttttgttgctcgacgttgggaaacagaatgggccagggaggttgagtgactgaagaccaagggttggtgcagcctcctcgccgcgctgcggggkctgggccgcacaggcttctgcccttctcggtgtccaggctccttgggtgatgctggagttgtcatggcygcagttcagtgtgagattttttaccaggtattgcgcttaagggacatgattttccattttcttcgcccggacaacttgaatgaaatgggcactgttgattccacttctgtcgaggagcttcggggctcagagaggtgatgacgtgcccaaggtgacgcaactcgtgaacagccgtgcctgccttgggcgcagctccggcgccagagctgggctcttcaacacggcatttagcgcagaaagtcgtggttcaggcagtatgggccgctgtgacaaaacacctaagactgggtagtttataaagaacagacattcaggccaggcacggtgactcacgcctgtaatcccagcactttgggaggccgaggcgcgtggatcatttgaggtcaggagtttgaaaccagcctggccaacatggtgaaaccccatctctactaaaaaaacaaaactagctgggggtggtggtgtatgcctgtggtcccagctacttgggaggctaaggtagaagaattgcttgaacctgggaggcagagattgcagtgagccgagatcacgccattgcactccagcctgggtgacacagtgagactccatckcaaaaa

SEQ ID NO: 2247 - protein, 286 aa, Homo sapien [sequence omitted]

SEQ ID NO: 2248 - DNA, 2011 bp, Homo sapien
ctactgccatggaacttctttatcactgccaaggagtactggatgttcaaactccgcaactcctccagcccagccaccggggaggaccctgagggctcagacatcctgaactactttgagagctaccttgccgttgcctccgccgtgccctccatgctgtgcctggtggccaacttcctgcttgtcaacagggttgcagtccacatccgtgtcctggcctcactgacggtcatcctggccatcttcatggtgataactgcactggtgaaggtggacacttcctcctggacccgtggcttttttgcggtcaccattgtctgcatggtgatcctcagcggtgcctccactgtcttcagcagcagcatctacggcatgaccggctcctttcctatgaggaactcccaggcactgatatcaggaggagccatgggcgggacggtcagcgccgtggcctcattggtggacttggctgcatccagtgatgtgaggaacagcgccctggccttcttcctgacggccaccatcttcctcgtgctctgcatgggactctacctgctgctgtccaggctggagtatgccaggtactacatgaggcctgttcttgcggcccatgtgttttctggtgaagaggagcttccccaggactccctcagtgccccttcggtggcctccagattcattgattcccacacaccccctctccgccccatcctgaagaagacggccagcctgggcttctgtgtcacctacgtcttcttcatcaccagcctcatctaccccgccgtctgcaccaacatcgagtccctcaacaagggctcgggctcactgtggaccaccaagtttttcatccccctcactaccttcctcctgtacaactttgctgacctatgtggccggcagctcaccgcctggatccgggtgccagggcccaatagcaaggcgctcccagggttcgtgctcctccggacctgcctcatccccctcttcgtgctctgtaactaccagccccgcgtccacctgaagactgtggtcttccagtccgatgtgtaccccgcactcctcagctccctgctggggctcagcaacggctacctcagcaccctggccctcctctacgggcctaagattgtgcccagggagctggctgaggccacgggagtggtgatgtccttttatgtgtgcttgggcttaacactgggctcagcctgctctaccctcctggtgcacctcatctagaagggaggacacaaggacattggtgcttcagagcctttgaagatgagaagagagtgcaggagggctgggggccatggaggaaaggcctaaagtttcacttggggacagagagcagagcacactcgggcctcatccctcccaagatgccagtgagccacgtccatgcccattccgtgcaaggcagatattccagtcatattaacagaacactcctgagacagttgaagaagaaatagcacaaatcaggggtactcccttcacagctgatggttaacattccaccttctttctagcccttcaaagatgctgccagtgttcgccctagagttattacaaagccagtgccaaaacccagccatgggctctttgcaacctcccagctgcgctcattccagctgacagcgagatgcaagcaaatgctcagctctccttaccctgaaggggtctccctggaatggaagtcccctggcatggtcagtcctcaggcccaaggctcaagtgtgcacagacccctgtgttctgtgggtgaacaactgcccactaaccagactggaaaacccagaaagatgggccttccatgaatgcttcatcccagagggaccagagggcctccctgtgcaagggatcaagcatgtctggcctgggttttcaaaaaaagagggatcctcatgacctggtggtctatggcctgggtcaagatgagggtctttcagtgttcctgtttacaacatgtcaaagccattggttcaagggcgtaataaatacttgcgtattc

SEQ ID NO: 2249 - protein, 397 aa, Homo sapien
MFKLRNSSSPATGEDPEGSDILNYFESYLAVASAVPSMLCLVANFLLVNRVAVHIRVLASLTVILAIFMVITALVKVDTSSWTRGFFAVTIVCMVILSGASTVFSSSIYGMTGSFPMRNSQALISGGAMGGTVSAVASLVDLAASSDVRNSALAFFLTATIFLVLCMGLYLLLSRLEYARYYMRPVLAAHVFSGEEELPQDSLSAPSVASRFIDSHTPPLRPILKKTASLGFCVTYVFFITSLIYPAVCTNIESLNKGSGSLWTTKFFIPLTTFLLYNFADLCGRQLTAWIRVPGPNSKALPGFVLLRTCLIPLFVLCNYQPRVHLKTVVFQSDVYPALLSSLLGLSNGYLSTLALLYGPKIVPRELAEATGVVMSFYVCLGLTLGSACSTLLVHLI

SEQ ID NO: 2250 - DNA, 1647 bp, Homo sapien
gcccgcccgcgccccgaccagcccggcctcgggcagccactcaccggtgtccccgtccgcgtccttcctccccgggtcccggccatggcgctgagtgaacccatcctgccgtccttctccactttcgccagcccgtgccgcgagcgcggcctgcaggagcgctggccgcgcgccgaacccgagtccggcggcaccgacgacgacctcaacagcgtgctggacttcatcctgtccatggggctggatggcctgggcgccgaggccgccccggagccgccgccgccgcccccgccgcctgcgttctattaccccgaacccggcgcgcccccgccctacagcgcccccgcgggtggcctggtgtctgagctgctgcgacccgagctggatgcgccgctggggcccgcactgcacggccgctttctgctggcgccgcccggccgcctggtcaaggccgagccccctgaagcggacggcggcggcggctacggctgcgcccccgggctgacccgtggaccgcgcggcctcaagcgcgagggcgccccgggcccggcggcttcgtgcatgcgaggtcccgggggccgccccccgccgccgcccgacacaccgccgctcagccccgacggccccgcgcgcctgcccgcgcccggtccgcgcgcctccttcccgccgcctttcggtggccctggtttcggcgcgcccgggcccggcctgcattacgcgccgcctgcgcccccagccttcggtctcttcgacgacgcggccgccgccgcggcagccctgggcctggcgccccccgccgcccgcggtctcctcacgccgcctgcgtccccgctggagctgctggaggccaagccaaagcgcggccgccgctcttggccccgcaaacgcaccgccactcacacctgcagctacgcgggctgcggcaagacctacaccaagagttcgcatctgaaggcgcatctgcgcacgcacacaggtgagaagccctaccactgcaactgggacggctgcggctggaagtttgcgcgctcagacgagctcacgcgccactaccgaaagcacacgggccaccggccattccagtgccatctgtgcgatcgtgccttttcgcgctccgatcacctggcgctgcacatgaaacggcacatgtagccgggacgcccccgcccacctgcggcgggccgtggcgggtcccacgcgccgggcgcggccccctcccaaactgtgactggtatttattggacccagagaaccgggccgggcacagcgtggctacagagggtctccctcgatgacgacgacgacgacgccaccaccccagcccccgtctgtgactgaaggcccggtgggaaaagaccacgatcctccttgacgagttttgtttttcaaaatggtgcaataatttaagtggcatcttctctcccaccgggtctacactagaggatcgaggcttgtgatgccttgtgagaaataagggccttaatttgtactgtctgcggcattttttataatattgtatatagtgactgacaaatattgtattactgtacatagagagacaggtgggcatttttgggctacctggttcgtttttataagattttgctgggttggttttttttttaattaaaaagttttgcatctttt

SEQ ID NO: 2251 - protein, 355 aa, Homo sapien
MALSEPILPSFSTFASPCRERGLQERWPRAEPESGGTDDDLNSVLDFILSMGLDGLGAEAAPEPPPPPPPPAFYYPEPGAPPPYSAPAGGLVSELLRPELDAPLGPALHGRFLLAPPGRLVKAEPPEADGGGGYGCAPGLTRGPRGLKREGAPGPAASCMRGPGGRPPPPPDTPPLSPDGPARLPAPGPRASFPPPFGGPGFGAPGPGLHYAPPAPPAFGLFDDAAAAAAALGLAPPAARGLLTPPASPLELLEAKPKRGRRSWPRKRTATHTCSYAGCGKTYTKSSHLKAHLRTHTGEKPYHCNWDGCGWKFARSDELTRHYRKHTGHRPFQCHLCDRAFSRSDHLALHMKRHM

SEQ ID NO: 2252 - DNA, 3197 bp, Homo sapien
ggaccacagctcctcccgtgcatccactcggcctgggaggttctggattttggctgtcgagggagtttgcctgcctctccagagaaagatggtcatgaggcccctgtggagtctgcttctctgggaagccctacttcccattacagttactggtgcccaagtgctgagcaaagtcgggggctcggtgctgctggtggcagcgcgtccccctggcttccaagtccgtgaggctatctggcgatctctctggccttcagaagagctcctggccacgtttttccgaggctccctggagactctgtaccattcccgcttcctgggccgagcccagctacacagcaacctcagcctggagctcgggccgctggagtctggagacagcggcaacttctccgtgttgatggtggacacaaggggccagccctggacccagaccctccagctcaaggtgtacgatgcagtgcccaggcccgtggtacaagtgttcattgctgtagaaagggatgctcagccctccaagacctgccaggttttcttgtcctgttgggcccccaacatcagcgaaataacctatagctggcgacgggagacaaccatggactttggtatggaaccacacagcctcttcacagacggacaggtgctgagcatttccctgggaccaggagacagagatgtggcctattcctgcattgtctccaaccctgtcagctgggacttggccacagtcacgccctgggatagctgtcatcatgaggcagcaccagggaaggcctcctacaaagatgtgctgctggtggtggtgcctgtctcgctgctcctgatgctggttactctcttctctgcctggcactggtgcccctgctcagggaaaaagaaaaaggatgtccatgctgacagagtgggtccagagacagagaacccccttgtgcaggatctgccataaaggacaatatgaactgatgcctggactatcagtaaccccactgcacaggcacacgatgctctgggacataactggtgcctggaaatcaccatggtcctcatatctcccatgggaatcctgtcctgcctcgaaggagcagcctgggcagccatcacaccacgaggacaggaagcaccagcacgtttcacacctcccccttccctctcccatcttctcatatcctggctcttctctgggcaagatgagccaagcagaacattccatccaggacactggaagttctccaggatccagatccatggggacattaatagtccaaggcattccctcccccaccactattcataaagtattaaccaactggcaccaaggaattgcctccagcctgagtcctaggctctaaaagatattacatatttgaactaatagaggaactctgagtcacccatgccagcatcagcttcagccccagaccctgcagtttgagatctgatgcttcctgagggccaaggcattgctgtaagaaaaggtctagaaataggtgaaagtgagaggtgggggacaggggtttctctttctggcctaaggactttcaggtaatcagagttcatgggccctcaaaggtaaattgcagttgtagacaccgaggatggttgacaacccatggttgagatgggcaccgttttgcaggaaacaccatattaatagacatcctcaccatctccatccgctctcacgcctcctgcaggatctgggagtgagggtggagagtctttcctcacgctccagcacagtggccaggaaaagaaatactgaatttgccccagccaacaggacgttcttgcacaacttcaagaaaagcagctcagctcaggatgagtcttcctgcctgaaactgagagagtgaagaaccataaaacgctatgcagaaggaacattatggagagaaagggtactgaggcactctagaatctgccacattcattttcaaatgcaaatgcagaagacttaccttagttcaaggggaggggacaaagaccccacagcccaacagcaggactgtagaggtcactctgactccatcaaactttttattgtggccatcttaggaaaatacattctgcccctgaatgattctgtctagaaaagctctggagtattgatcactactggaaaaacacttaaggagctaaacttaccttcggggattattagctgataaggttcacagtttctctcacccaggtgtaactggattttttctggggcctcaatccagtcttgataacagcgaggaaagaggtattgaagaaacaggggtgggtttgaagtactattttccccagggtggcttcaatctccccacctaggatgtcagccctgtccaaggaccttccctcttctcccccagttccctgggcaatcacttcaccttggacaaaggatcagcacagctggcctccagatccacatcaccactcttccactcgattgttcccagatcctccctgcctggcctgctcagaggttccctgttggtaacctggctttatcaaattctcatccctttcccacacccacttctctcctatcaccttcccccaagattacctgaacagggtccatggccactcaacctgtcagcttgcaccatccccacctgccacctacagtcaggccacatgcctggtcactgaatcatgcaaaactggcctcagtccctaaaaatgatgtggaaaggaaagcccaggatctgacaatgagccctggtggatttgtggggaaaaaatacacagcactccccacctttctttcgttcatctccagggccccacctcagatcaaagcagctctggatgagatgggacctgcagctctccctccacaaggtgactcttagcaacctcatttcgacagtggtttgtagcgtggtgcaccagggccttgttgaacagatccacactgctctaataaagttcccatccttaatgactcacttgtcaactagtggactaattaaccctccaccaaaaaaacacaaagtgcttctgtgagaccaattttgtgctaatgagcattgagactgatgctttgtaagtcacaccacaacaaatattgattgagggcgctgcatgtgctgggtacatttcttggcacttgggaatcagtagtcaagcgaaacccttgcctttgagagtttatggtctggataatataaataaacaagtaagcataaaaaaaaaaaaaaaaa

SEQ ID NO: 2253 - protein, 285 aa, Homo sapien
MVMRPLWSLLLWEALLPITVTGAQVLSKVGGSVLLVAARPPGFQVREAIWRSLWPSEELLATFFRGSLETLYHSRFLGRAQLHSNLSLELGPLESGDSGNFSVLMVDTRGQPWTQTLQLKVYDAVPRPVVQVFIAVERDAQPSKTCQVFLSCWAPNISEITYSWRRETTMDFGMEPHSLFTDGQVLSISLGPGDRDVAYSCIVSNPVSWDLATVTPWDSCHHEAAPGKASYKDVLLVVVPVSLLLMLVTLFSAWHWCPCSGKKKKDVHADRVGPETENPLVQDLP

SEQ ID NO: 2254 - DNA, 1203 bp, Homo sapien
ggcacgaggccgccttctgcatcgcggcttcggcggcttccacctagacacctaacagtcgcggagccggccgcgtcgtgagggggtcggcacggggagtcgggcggtcttgtgcatcttggctacctgtgggtcgaagatgtcggacatcggagactggttcaggagcatcccggcgatcacgcgctattggttcgccgccaccgtcgccgtgcccttggtcggcaaactcggcctcatcagcccggcctacctcttcctctggcccgaagccttcctttatcgctttcagatttggaggccaatcactgccaccttttatttccctgtgggtccaggaactggatttctttatttggtcaatttatatttcttatatcagtattctacgcgacttgaaacaggagcttttgatgggaggccagcagactatttattcatgctcctctttaactggatttgcatcgtgattactggcttagcaatggatatgcagttgctgatgattcctctgatcatgtcagtactttatgtctgggcccagctgaacagagacatgattgtatcattttggtttggaacacgatttaaggcctgctatttaccctgggttatccttggattcaactatatcatcggaggctcggtaatcaatgagcttattggaaatctggttggacatctttattttttcctaatgttcagatacccaatggacttgggaggaagaaattttctatccacacctcagtttttgtaccgctggctgcccagtaggagaggaggagtatcaggatttggtgtgccccctgctagcatgaggcgagctgctgatcagaatggcggaggcgggagacacaactggggccagggctttcgacttggagaccagtgaaggggcggcctcgggcagccgctcctctcaagccacatttcctcccagtgctgggtgcgcttaacaactgcgttctggctaacactgttggacctgacccacactgaatgtagtctttcagtacgagacaaagtttcttaaatcccgaagaaaaatataagtgttccacaagtttcacgattctcattcaagtccttactgctgtgaagaacaaataccaactgtgcaaattgcaaaactgaaaaaaaaaaaaaaaaaaaaaaaaaaaaaaaaaaaaaaaaaaaaaaaaaaaaaaaaaaaaaaaaaaa

SEQ ID NO: 2255 - protein, 251 aa, Homo sapien
MSDIGDWFRSIPAITRYWFAATVAVPLVGKLGLISPAYLFLWPEAFLYRFQIWRPITATFYFPVGPGTGFLYLVNLYFLYQYSTRLETGAFDGRPADYLFMLLFNWICIVITGLAMDMQLLMIPLIMSVLYVWAQLNRDMIVSFWFGTRFKACYLPWVILGFNYIIGGSVINELIGNLVGHLYFFLMFRYPMDLGGRNFLSTPQFLYRWLPSRRGGVSGFGVPPASMRRAADQNGGGGRHNWGQGFRLGDQ

SEQ ID NO: 2256 - DNA, 3726 bp, Homo sapien
cagcgctgctccccgggcgctcctccccgggcgctcctccccaggcctcccgggcgcttggatcccggccatctccgcacccttcaagtgggtgtgggtgatttcctggcggggggagcagccaggtgagcccaagatgctgctgcgctcgaagcctgcgctgccgccgccgctgatgctgctgctcctggggccgctgggtcccctctcccctggcgccctgccccgacctgcgcaagcacaggacgtcgtggacctggacttcttcacccaggagccgctgcacctggtgagcccctcgttcctgtccgtcaccattgacgccaacctggccacggacccgcggttcctcatcctcctgggttctccaaagcttcgtaccttggccagaggcttgtctcctgcgtacctgaggtttggtggcaccaagacagacttcctaattttcgatcccaagaaggaatcaacctttgaagagagaagttactggcaatctcaagtcaaccaggatatttgcaaatatggatccatccctcctgatgtggaggagaagttacggttggaatggccctaccaggagcaattgctactccgagaacactaccagaaaaagttcaagaacagcacctactcaagaagctctgtagatgtgctatacacttttgcaaactgctcaggactggacttgatctttggcctaaatgcgttattaagaacagcagatttgcagtggaacagttctaatgctcagttgctcctggactactgctcttccaaggggtataacatttcttgggaactaggcaatgaacctaacagtttccttaagaaggctgatattttcatcaatgggtcgcagttaggagaagattttattcaattgcataaacttctaagaaagtccaccttcaaaaatgcaaaactctatggtcctgatgttggtcagcctcgaagaaagacggctaagatgctgaagagcttcctgaaggctggtggagaagtgattgattcagttacatggcatcactactatttgaatggacggactgctaccagggaagattttctaaaccctgatgtattggacatttttatttcatctgtgcaaaaagttttccaggtggttgagagcaccaggcctggcaagaaggtctggttaggagaaacaagctctgcatatggaggcggagcgcccttgctatccgacacctttgcagctggctttatgtggctggataaattgggcctgtcagcccgaatgggaatagaagtggtgatgaggcaagtattctttggagcaggaaactaccatttagtggatgaaaacttcgatcctttacctgattattggctatctcttctgttcaagaaattggtgggcaccaaggtgttaatggcaagcgtgcaaggttcaaagagaaggaagcttcgagtataccttcattgcacaaacactgacaatccaaggtataaagaaggagatttaactctgtatgccataaacctccataatgtcaccaagtacttgcggttaccctatcctttttctaacaagcaagtggataaataccttctaagacctttgggacctcatggattactttccaaatctgtccaactcaatggtctaactctaaagatggtggatgatcaaaccttgccacctttaatggaaaaacctctccggccaggaagttcactgggcttgccagctttctcatatagtttttttgtgataagaaatgccaaagttgctgcttgcatctgaaaataaaatatactagtcctgacactgaatttttcaagtatactaagagtaaagcaactcaagttataggaaaggaagcagataccttgcaaagcaactagtgggtgcttgagagacactgggacactgtcagtgctagatttagcacagtattttgatctcgctaggtagaacactgctaataataatagctaataataccttgttccaaatactgcttagcattttgcatgttttacttttatctaaagttttgttttgttttattatttatttatttatttattttgtgacggagagagattccatctcaaaaaaacaagttattaaaaatgtatatgaatgctcctaatatggtcaggaagcaaggaagcgaaggatatattatgagttttaagaaggtgcttagctgtatatttatctttcaaaatgtattagaagattttagaattctttccttcatgtgccatctctacaggcacccatcagaaaaagcatactgccgttaccgtgaaactggttgtaaaagagaaactatctatttgcaccttaaaagacagctagattttgctgattttcttctttcggttttctttgtcagcaataatatgtgagaggacagattgttagatatgatagtataaaaaatggttaatgacaattcagaggcgaggagattctgtaaacttaaaattactataaatgaaattgatttgtcaagaggataaattttagaaaacacccaataccttataactgtctgttaatgcttgctttttctctacctttcttccttgtttcagttgggaagcttttggctgcaagtaacagaaactcctaattcaaatggcttaagcaataaggaaatgtatattcccacataactagacgttcaaacaggccaggctccagcacttcagtacgtcaccaggggatctgggttcttcccagctctctgctctgccatctttagcgctggcttcattctcagactctggtagcatgatggctgtagctgtttcatgggccccttcaaacctcatagcaaccagaggaagaaaatgagccattttttgagtctccttcatagacttgaataactctttttcagagcttctcacagcaaacctctcctcatgtctcctcatgtcttattgttcagaaatgggtaatgtggccatttcaccagtcactgccaacaacaacgaggttcctataattgtctctgagtaaccctttggaatggagagggtgttggtcagtctacaaactgaacactgcagttctgcgctttttaccagtgaaaaaatgtaattattttcccctcttaaggattaatattcttcaaatgtatgcctgttatggatatagtatctttaaaattttttattttaatagctttaggggtacacactttttgcttacaggggtgaattgtgtagtggtgaagactcggcttttaatgtacttgtcacctgagtgatgtacattgtacccaataggtaatttttcatccattaccctccttccgccctcttcccttctgagtctccaacatcccttataccactgtgtatgttcttgtgtacctacagctaagcttccacttataagtgagaacatgcagtatttggttttccattcctgagttacttcccttaggataacagcccccagttccgtccaagttgctgcaaaatacattattcttctttatggctgagtaatagtccatggtacatatataccacattttctttatccacttatcagttgatggacacttaggttaattccattcaatttcattcaatttaagtatatttgtaaggagctaaagctgaaaattaaattttagatctttcaatactcttaaattttatatgtaagtggtttttatattttcacatttgaaataaagtaatttttataaccttgaaaaaaaaaaaaaaaaaaaa

SEQ ID NO: 2257 - protein, 543 aa, Homo sapien
MLLRSKPALPPPLMLLLLGPLGPLSPGALPRPAQAQDVVDLDFFTQEPLHLVSPSFLSVTIDANLATDPRFLILLGSPKLRTLARGLSPAYLRFGGTKTDFLIFDPKKESTFEERSYWQSQVNQDICKYGSIPPDVEEKLRLEWPYQEQLLLREHYQKKFKNSTYSRSSVDVLYTFANCSGLDLIFGLNALLRTADLQWNSSNAQLLLDYCSSKGYNISWELGNEPNSFLKKADIFINGSQLGEDFIQLHKLLRKSTFKNAKLYGPDVGQPRRKTAKMLKSFLKAGGEVIDSVTWHHYYLNGRTATREDFLNPDVLDIFISSVQKVFQVVESTRPGKKVWLGETSSAYGGGAPLLSDTFAAGFMWLDKLGLSARMGIEVVMRQVFFGAGNYHLVDENFDPLPDYWLSLLFKKLVGTKVLMASVQGSKRRKLRVYLHCTNTDNPRYKEGDLTLYAINLHNVTKYLRLPYPFSNKQVDKYLLRPLGPHGLLSKSVQLNGLTLKMVDDQTLPPLMEKPLRPGSSLGLPAFSYSFFVIRNAKVAACI

SEQ ID NO: 2258 - DNA, 1412 bp, Homo sapien
ggctgcgcttccctggtcaggcacggcacgtctggccggccgccaggatgcaggccccgcacaaggagcacctgtacaagttgctggtgattggcgacctgggcgtggggaagaccagtatcatcaagcgctacgtgcaccagaacttctcctcgcactaccgggccacaatcggcgtggacttcgcgctcaaggtgctccactgggacccggagactgtggtgcgcctgcagctctgggatatcgcaggtcaagaaagatttggaaacatgacgagggtctattaccgagaagctatgggtgcatttattgtcttcgatgtcaccaggccagccacatttgaagcagtggcaaagtggaaaaatgatttggactccaagttaagtctccctaatggcaaaccggtttcagtggttttgttggccaacaaatgtgaccaggggaaggatgtgctcatgaacaatggcctcaagatggaccagttctgcaaggagcacggtttcgtaggatggtttgaaacatcagcaaaggaaaatataaacattgatgaagcctccagatgcctggtgaaacacatacttgcaaatgagtgtgacctaatggagtctattgagccggacgtcgtgaagccccatctcacatcaaccaaggttgccagctgctctggctgtgccaaatcctagtaggcacctttgctggtgtctggtaggaatgacctcattgttccacaaattgtgcctctatttttaccattttgggtaaacgtcaggatagatataccacatgtggcaagccaaagatctatgcctctgttttttcaatgagagagaaatagcaaatgttctttctatgctttcctcaccatcatcacagtgtttacaaacttttgaaaatatttagtctgttacaaacttctgtcatgtagctgaccaaaatcctgcagggccacagtcggcactgttatttgcttcttttaatcagcaaaggcctcaagtcttaaaataaaaggggagaagaacaaactagctgtcaagtcaaggactggctttcaccttgccctggtgtctttttccagatttcaatatattctctgatggcctgacaggcctattaagtagatgtgatattttcttccaagatgacctccattctcggcagacctaagagttgcctctgagttagctctttggaatcgtgaacacaggtgtgctatattgtccttgtcctaactgtcacttgccatggcctgaatgttggcttaactgaatattgtatgaaaagacatgcctccatatgtgcctttctgttagctctctttgactcaagctgtggggctcctctatacatgctatacatgtaatatatattatatatatttttgcaagtgaacaataaaacattaaaagataaaa

SEQ ID NO: 2259 - protein, 211 aa, Homo sapien
MQAPHKEHLYKLLVIGDLGVGKTSIIKRYVHQNFSSHYRATIGVDFALKVLHWDPETVVRLQLWDIAGQERFGNMTRVYYREAMGAFIVFDVTRPATFEAVAKWKNDLDSKLSLPNGKPVSVVLLANKCDQGKDVLMNNGLKMDQFCKEHGFVGWFETSAKENINIDEASRCLVKHILANECDLMESIEPDVVKPHLTSTKVASCSGCAKS

SEQ ID NO: 2260 - DNA, 2059 bp, Homo sapien
ggcacgagggcgggtgggaagccgtgtctcgcagtcgtggactcgtgcagctggggcgtccgcagccgctcgtcacccgcgtgatgctgtttctggcgttgggcagcccgtgggcggtcgaactgcctctctgcggaaggaggactgcattgtgtgcggccgccgcgctccgaggtccccgggcctctgtctcccgggcgtcctccagcagcgggccttcggggccggtagccggctggagtacggggccttcgggagccgcgcgccttctccggcgtccgggtcgagcgcagatccctgtttattgggaaggatatgttcgattcttaaatacgccatctgacaaatcagaagatggaaggctaatttatactggcaatatggcccgagcagtgtttggtgtgaaatgtttctcttattctacgagtctgattggccttacatttctgccatacatttttacacaaaataatgctatttctgaaagtgtgcctctgcctattcaaatcatattctatggcatcatgggaagctttacggtgatcaccccagtgctgcttcactttattacaaaaggctatgtcattcgattgtaccatgaggccacaacagacacttataaagccattacctacaatgctatgcttgcagaaacgagtacagtgtttcaccagaatgatgtgaagattccagatgctaaacatgtatttaccacattttatgctaaaacaaaatcactgttagttaatccagtgctctttccaaaccgtgaagactatatccatctaatgggttatgacaaagaagaatttattttgtatatggaagaaaccagtgaagagaaacggcataaagatgacaaatgagcctatttgttagtgttcgtgctcaaatgtgatttacgttttaatgtataataataaaattgccttttgcattccgttagtgactgattgttaaaaataatttgaaattatcaaagcttttaatttccagagaatgatgtttgtttataataaaacaagctatgtttgaaaaccaaaatgtagtatctaccattcgtgttttagaaaggtatgtgaataaatatgttcatgctagtataagagttctgtgttactgtggttgactctaaactggggatctgatgtcagtagcaaatgggagagttgctttattctttgtgtatggatttttctaagtgtataaatattttccgacattaaaagacattttctctttgaggaagacacagtcataggtggtgcggagctgtggtccacctgctcctgctcctgactcactgctctttgctgttgcctgaggaccaagtctgtcaggaagctggctaggaagccttgcagcagccatggcttttaaacataccagaaaaacacccgtggagtcagaggtggcaattcaccgaattcatatcactctaacgagttgcaacgtaaaatccctggataaggtgtgtgctgacttgatctgaggagcaaaggaaaagaatcagtgaaaggaccagtttgaatgcctaccaagactttgagaatcactacaagaaaaacttacggtgaaggttctaaggcatgggatcgtttccagatgagaatccacaagcgactcattgacttgcgcagtcctcagatagttaagcagattacttccatcagtattgagccaggagttgagatggaagtcaccattgcaaatgcttaagtcaactgttttcataaattgattaccagttgttaaaaaattttcaaaaaaccgcaaaatttcaagaaattcacaaattatgggagcagttttaagtcttctttggttcagaacacaggtttttgcctaacccctggcatgattgcccataagaacatacatgtacagttgaactggtggttagctatacgggaaatggtaagtagtgttgtcttcagtatcttaatttgtttctgcaactgtgcactcctcccttggtggcaccctatgggtgtaggaaaaccactgttattaaacaggtgaaaaataaaaaatttttcaaaaaaaaaaaaaaaaaaaa

SEQ ID NO: 2261 - protein, 161 aa, Homo sapien
MARAVFGVKCFSYSTSLIGLTFLPYIFTQNNAISESVPLPIQIIFYGIMGSFTVITPVLLHFITKGYVIRLYHEATTDTYKAITYNAMLAETSTVFHQNDVKIPDAKHVFTTFYAKTKSLLVNPVLFPNREDYIHLMGYDKEEFILYMEETSEEKRHKDDK

SEQ ID NO: 2262 - DNA, 1700 bp, Homo sapien
cggaattggtgggttcttggtctcactgagttctagaatgaagctgcagaccctcgcagtgagtgttacagctcttaaggctctctgactgccacccctgcctgcctgcccggccctgcacaacatgcagccctccggcctcgagggtcccggcacgtttggtcggtggcctctgctgagtctgctgctcctgctgctgctgctccagcctgtaacctgtgcctacaccacgccaggcccccccagagccctcaccacgctgggcgcccccagagcccacaccatgccgggcacctacgctccctcgaccacactcagtagtcccagcacccagggcctgcaagagcaggcacgggccctgatgcgggacttcccgctcgtggacggccacaacgacctgcccctggtcctaaggcaggtttaccagaaagggctacaggatgttaacctgcgcaatttcagctacggccagaccagcctggacaggcttagagatggcctcgtgggcgcccagttctggtcagcctatgtgccatgccagacccaggaccgggatgccctgcgcctcaccctggagcagattgacctcatacgccgcatgtgtgcctcctattctgagctggagcttgtgacctcggctaaagctctgaacgacactcagaaattggcctgcctcatcggtgtagagggtggccactcgctggacaatagcctctccatcttacgtaccttctacatgctgggagtgcgctacctgacgctcacccacacctgcaacacaccctgggcagagagctccgctaagggcgtccactccttctacaacaacatcagcgggctgactgactttggtgagaaggtggtggcagaaatgaaccgcctgggcatgatggtagacttatcccatgtctcagatgctgtggcacggcgggccctggaagtgtcacaggcacctgtgatcttctcccactcggctgcccggggtgtgtgcaacagtgctcggaatgttcctgatgacatcctgcagcttctgaagaagaacggtggcgtcgtgatggtgtctttgtccatgggagtaatacagtgcaacccatcagccaatgtgtccactgtggcagatcacttcgaccacatcaaggctgtcattggatccaagttcatcgggattggtggagattatgatggggccggcaaattccctcaggggctggaagacgtgtccacatacccggtcctgatagaggagttgctgagtcgtggctggagtgaggaagagcttcagggtgtccttcgtggaaacctgctgcgggtcttcagacaagtggaaaaggtacaggaagaaaacaaatggcaaagccccttggaggacaagttcccggatgagcagctgagcagttcctgccactccgacctctcacgtctgcgtcagagacagagtctgacttcaggccaggaactcactgagattcccatacactggacagccaagttaccagccaagtggtcagtctcagagtcctccccccacatggccccagtccttgcagttgtggccaccttcccagtccttattctgtggctctgatgacccagttagtcctgccagatgtcactgtagcaagccacagacaccccacaaagttcccctgttgtgcaggcacaaatatttcttgaaataaatgttttggacatagaaaaaa

SEQ ID NO: 2263 - protein, 486 aa, Homo sapien
MQPSGLEGPGTFGRWPLLSLLLLLLLLQPVTCAYTTPGPPRALTTLGAPRAHTMPGTYAPSTTLSSPSTQGLQEQARALMRDFPLVDGHNDLPLVLRQVYQKGLQDVNLRNFSYGQTSLDRLRDGLVGAQFWSAYVPCQTQDRDALRLTLEQIDLIRRMCASYSELELVTSAKALNDTQKLACLIGVEGGHSLDNSLSILRTFYMLGVRYLTLTHTCNTPWAESSAKGVHSFYNNISGLTDFGEKVVAEMNRLGMMVDLSHVSDAVARRALEVSQAPVIFSHSAARGVCNSARNVPDDILQLLKKNGGVVMVSLSMGVIQCNPSANVSTVADHFDHIKAVIGSKFIGIGGDYDGAGKFPQGLEDVSTYPVLIEELLSRGWSEEELQGVLRGNLLRVFRQVEKVQEENKWQSPLEDKFPDEQLSSSCHSDLSRLRQRQSLTSGQELTEIPIHWTAKLPAKWSVSESSPHMAPVLAVVATFPVLILWL

SEQ ID NO: 2264 - DNA, 1544 bp, Homo sapien
attggtgaagctctaacggctgttttgactggcgtagccggagccggcgacgtgaggcgggcgttgctcgcgcgacaagtagttgctgggacagcgaaatggaggggtgtgtgtctaacctaatggtctgcaacctggcctacagcgggaagctggaagagttgaaggagagtattctggccgataaatccctggctactagaactgaccaggacagcagaactgcattgcactgggcatgctcagctggacatacagaaattgttgaatttttgttgcaacttggagtgccagtgaatgataaagacgatgcaggttggtctcctcttcatattgcggcttctgctggccgggatgagattgtaaaagcccttctgggaaaaggtgctcaagtgaatgctgtcaatcaaaatggctgtactcccttacattatgcagcttcgaaaaacaggcatgagatcgctgtcatgttactggaaggcggggctaatccagatgctaaggaccattatgaggctacagcaatgcaccgggcagcagccaagggtaacttgaagatgattcatatccttctgtactacaaagcatccacaaacatccaagacactgagggtaacactcctctacacttagcctgtgatgaggagagagtggaagaagcaaaactgctggtgtcccaaggagcaagtatttacattgagaataaagaagaaaagacacccctgcaagtggccaaaggtggcctgggtttaatactcaagagaatggtggaaggttaaacagcttggatttattcttactttgtatgttgtgttgttgtccccagtgtcctacaaactaatgtatttgtgcacaagacatcatctatgaatgatgaagttttctcaccttcaaagtcttataaacatgttgactcttgttcctgctgagttacttgttcgaagcttacagcttgttttccaggcatcgaataactgttgagattgttctactgttgtcgtatattcttctatattgaattctggttaatttggagtaactaattctgtggctgttgtgagtcttcagcaccctcccatgtaccttatatccctctctgaaacagaacagctccaatagcaacaagctagttgttctgccagatgtttctatgtggattctgtaatgttcctccatacagttaaaacatcctaacttgtttttcaagctcactcaggcctacgccaaacgtttctgttttttttaaccatgaggtttaatttatttttgtgataggagggatatttacatattttagtggaccacattttaagttggatggtgtgctctaaaatactgaaaaacaatagcccatatacctatgtatttgtttttgatgggttgtttactctgaaataaaatgtatggttttcttaaaaggaagttttaaagtacctattttgtgtcatcctgtattgaaaagaatgtcaagcttgttaaaatgacatgtaacaaaaatgtattttgatttgtatttcagaaactaaaaaataaaatgttgaaag

SEQ ID NO: 2265 - protein, 226 aa, Homo sapien
MEGCVSNLMVCNLAYSGKLEELKESILADKSLATRTDQDSRTALHWACSAGHTEIVEFLLQLGVPVNDKDDAGWSPLHIAASAGRDEIVKALLGKGAQVNAVNQNGCTPLHYAASKNRHEIAVMLLEGGANPDAKDHYEATAMHRAAAKGNLKMIHILLYYKASTNIQDTEGNTPLHLACDEERVEEAKLLVSQGASIYIENKEEKTPLQVAKGGLGLILKRMVEG

SEQ ID NO: 2266 - DNA, 2458 bp, Homo sapien
ggcacgaggcttgtccccagcgcctggactcccccttaactgcttgggaaatgtgacctttgctctggggggcctggccctgcaggccccaaccttccctcatctctggcggccctcttgggcctctgacccagcccctccccgggccaggctcacagaagctggcttctgggactgtcctgggcccaagtgggcacctgcgccagccccacctgtgcctgggctgtggccccttcctacagggcgctcaccatggccccgccgctcctgctgctgctgctggccagtggagcggccgcctgcccgctgccctgcgtctgccagaacctgtccgagtcgctcagcaccctctgtgcccaccgaggcctgctgtttgtgccgcccaacgtggaccggcgcacagtggagctgcggctggctgacaacttcatccaggccctggggccccctgacttccgcaacatgacgggactggtggacctgacactgtctcgcaatgccatcacccgcattggggcccgcgcctttggggacctcgagagcctgcgttccctccaccttgacggcaacaggctggtggagctgggcaccgggagcctccggggccccgtcaatctgcagcacctcatcctcagcggcaaccagctgggccgcatcgcgccgggagccttcgacgacttcctagagagcctggaggacctggacctgtcctacaacaacctccggcaggtgccctgggccggcatcggcgccatgcctgccctgcacaccctcaacctggaccataaccttattgacgcactgcccccaggcgccttcgcccagctcggtcagctctcccgcctggacctcacctccaaccgcctggccacgctggctccggacccgcttttctctcgtgggcgtgatgcagaggcctctcccgcccccctggtgctgagctttagcgggaaccccctgcactgcaactgtgagctgctgtggctgcggcggctggcgcggccggacgacctggaaacgtgcgcctccccgcccggcctggccggccgctacttctgggcagtgcccgagggcgagttctcctgtgagccgcccctcattgcccgccacacgcagcgcctctgggtgctggaaggccagcgggccacgctgcggtgccgggccctgggtgaccccgcgcctaccatgcactgggtcggtcctgacgaccggttggttggcaactcctcccgagcccgggctttccccaacgggaccttagagattggggtgaccggcgctggggacgctgggggctacacctgcatcgccaccaaccctgctggtgaggccacagcccgagtagaactgcgggtgctggccttgccccatggtgggaacagcagtgccgaggggggccgccccgggccctcggacatcgccgcctccgctcgcactgctgccgagggtgaggggacgctggagtctgagccagccgtgcaggtgacggaggtgaccgccacctcagggctggtgagctggggtcccgggcggccagccgacccagtgtggatgttccaaatccagtacaacagcagcgaagatgagaccctcatctaccggattgtcccagcctccagccaccacttcctgctgaagcacctcgtccccggcgctgactatgacctctgcctgctggccttgtcaccggccgctgggccctctgacctcacggccaccaggctgctgggctgtgcccatttctccacgctgccggcctcgcccctgtgccacgccctgcaggcccacgtgctgggcgggaccctgaccgtggccgtggggggtgtgctggtggctgccttactggtcttcactgtggccttgctggttcggggccggggggccggaaatggccgcctccccctcaagctcagccacgtccagtcccagaccaatggaggccccagccccacacccaaggcccacccgccgcggagccccccgccccggccgcagcgcagctgctctctggacctgggagatgccgggtgctacggttatgccaggcgcctgggaggagcttgggcccgacggagccactctgtgcatggggggctgctcggggcagggtgccggggggtaggaggcagcgccgagcggctggaagagagtgtggtgtgatggacgggcagcttcctgtgtgctccaagggatgagcctcgtggggcagagggcccggggccgccgcctggcctgggagtccctccctggtttttattctcagtacctcaggctcccctgtgtacttggaggggcagggagccctttcctcggttctggcctccagaccagggtaagggcaggcccctccaacaggtgctcacagccaccgaggcaggggctgcagccacccactgggagtcttgtttttatttataataaaattgttggggacacctcaaaaaaaaaaaaaaaaaaa

SEQ ID NO: 2267 - protein, 324 aa, Homo sapien
MHWVGPDDRLVGNSSRARAFPNGTLEIGVTGAGDAGGYTCIATNPAGEATARVELRVLALPHGGNSSAEGGRPGPSDIAASARTAAEGEGTLESEPAVQVTEVTATSGLVSWGPGRPADPVWMFQIQYNSSEDETLIYRIVPASSHHFLLKHLVPGADYDLCLLALSPAAGPSDLTATRLLGCAHFSTLPASPLCHALQAHVLGGTLTVAVGGVLVAALLVFTVALLVRGRGAGNGRLPLKLSHVQSQTNGGPSPTPKAHPPRSPPPRPQRSCSLDLGDAGCYGYARRLGGAWARRSHSVHGGLLGAGCRGVGGSAERLEESVV

SEQ ID NO: 2268 - DNA, 3674 bp, Homo sapien
agacgcgtaggctggcagcccgctgagcccgccagactccgccgccgtcgggagccggccgctgggagcccgtcgctatgggaccgcgctgagccgcccgctggcgggggagcagcgcggtcgaggatggaggggccggcagagtggggccccgaggcggcgctgggccccgaggcggtgctgcgcttcctggcggagcgcgggggccgggccctgcacgccgagctggtgcagcacttcaggggcgccctgggcggcgaaccggagcagcgcgcccgcgcccgcgcgcacttcaaggagctggtgaacgccgtggccactgtgcgcgtcgatcccgccgacggcgccaagtacgtgcacctcaagaagaggttctgtgaagggccgtccgagccctccggggacccgccgcgaatccaggtgaccgccgagcccgaggcccccgacggccctgccgggcccgaggcgcgcgatcggctccccgacgcggcggccccggagtcgctccctggacagggccgcgagctgggcgagggagagccccccgcccccgcgcactggccgcccctgagcgccggggctcgcaggaagaactcgcggcgcgacgtgcagcccctaccgcggactccagccccggggcccagcgaggacctggagctcccgccacatggctgcgaggaggcggacaggggcagctcccttgtgggggctaccgcacagaggccggcccgccagaacctccgtgacctggtgatgggcagctccccgcagctgaagaggagcgtgtgtcccgggggcagcagcccgggcagctcctccgggggaggacgcggcagaggcgggggcgactcagacagcgcatcggtggcctcgtcgtccgcggaggaggagagcagcggcggaggctccgtgacgctggaccccctggagcacgcgtggatgctctctgcctccgatggcaagtgggacagcctggagggcttgctcacctgcgagcccggcctgctggtcaagcgggacttcattaccggcttcacttgcctgcgctgggccgcaagcacggcaggcaggagcttgtggccatgctagtcaacttcgccaacaaacaccagctgccggtgaacatggacgccaggacgagcgggggttacaccgccctgcacttggcagccatgcacggccacgtggaggtggtgaagctgctggtgggggcctacgacgccgatgtggacatcagggactacagtgggaaaaaggcctcccagtacctgagtcggagcatcgccgaggagatcaagaacctggtgggagccctggacgagggtgacggggaaagcgccgcgggtagcggcggcgggcgctggaggctttcaaaggtgcttccctcgcatctcatcacctacaaactctcacacgccctagaagatggaggggaccatcaccaccatcaccactcggctgaggggtgggtcggaggcaaagccaaggatccagggcgcaaagcctcgggcagctctagtggacgtataaaacccagactcaacaaaatccgattcagaacccagatcgtccacaccacaccctctttcagggacccagagcagccgctggagggcaggggggaggagggagtgggggaggaacgacctgttaaaggccactcgcccttcacattgagaccaaagtccaatgtatttgggtaaaaattgcttcttttagaaaatgcaaaggtttatttgtcttaataaattgaatactaggtgttgtaaggaagtgagaccagaaggacaagctaaattatgcattcttacttgagggatcggaatggatggggcggagttctcttcgggctagccttctgggaaaagtggatgtctttttcagagattcatcataccttgacctgtacctcttctctgccctccacttccctgccctggagtccgtttctggaggctagaaatgtatctaaattgggggaacagaatgaatgaattaatgaatgagagttcctttgctttaaccattcctggatgcctgcaaagtaaggaataatgcagtttttatgtatctgattttataaggggttactctttcaagagtaacaaaaaaatgcaaactgtaatgaaactacattgtatttctaagtgtgaaaacgacaggctgccccgtttttactaattgcatttgcattttaaggtactactgaaggtcagatcaaagttgaaatgcaaaaatactaattagagaataatgtgaataaaatgggaatcttcttggtattttatgtgtattgtaagtagcagttaaattatttttttaaaagcaatttcagttttaatcactgaacaaaagaaacaggcaacattcacttctgtagtatggtttccacctatctctaacaccactattaaggtacaccagtgttaaggtacattaataactacacaaaattttatttaaagagaacacttagcagcctatgatagttttcaataaaatgttgcctctctttcggattctcactaacttttgttactattctaaaagtttgaatttgctggggtgtttattctgaggattatttaaccattgttctatttggcataaccctatttaatggtgcttagagctgaattacctacagaaactgtttctggtttaaataattagcacaaattggcctaagtattcatgagcccatgtttctgtgaagtaattattaaaccaacttaatgattcttatgtaaggtacactttttattttaatacattggtagtctctatgacttgtagcaatgttttacaaatgtttaaaatgctaaacttaattttccaagcttttcttgacaattagatacctatcctgtagttactgaaaatctgggtagtaaatctacccaattaaaatggcactttataaaagggaatagagaagagatgggactatttctatatttaaatgctgctggctattcctttgtatataaatgaaaaataccattcattaaaattaagtactcgtttaagtatggttcttaattacatttcattcatttatattagagtaaatggcttcataactactttaaaatttaacccacaagcatattaaatctgtttgttataaggttggaaacaatttttgagagggactaatttaaacaagtcctcctttagtcttttgggtcgcgtagttgctgaaacctaagtacctgcagcctacaggataaggaagttcacagcctgcggggtgaatgaacccatgtgtgaactgcacagagcaattcatagaaaatgcatagaaatttgtaacactttggtcacatctgtctctagatggtcattgaatttgtttaaagatggatgaaaggccaggcatggtggctcatgcctgtaatcccagcactttgggaggccgaggcaggtggatcacttgaggccaggagtttgaaaccagcctggccaacatggtgaaaacctgtctctactaaaaatacaaaaattagccgagcgtggtggtgcgtgcctgtagtcccagctacttaggaggctgaggcatgagaatcacttaaacctgagaggtggaggttgcagttgagccaagatcacgacactgcactccagcctgggcaacggagactctgtctcaaaaaaaaaaaaaaaaaaaaaaa

SEQ ID NO: 2269 - protein, 320 aa, Homo sapien
MEGPAEWGPEAALGPEAVLRFLAERGGRALHAELVQHFRGALGGEPEQRARARAHFKELVNAVATVRVDPADGAKYVHLKKRFCEGPSEPSGDPPRIQVTAEPEAPDGPAGPEARDRLPDAAAPESLPGQGRELGEGEPPAPAHWPPLSAGARRKNSRRDVQPLPRTPAPGPSEDLELPPHGCEEADRGSSLVGATAQRPARQNLRDLVMGSSPQLKRSVCPGGSSPGSSSGGGRGRGGGDSDSASVASSSAEEESSGGGSVTLDPLEHAWMLSASDGKWDSLEGLLTCEPGLLVKRDFITGFTCLRWAASTAGRSLWPC

SEQ ID NO: 2270 - DNA, 519 bp, Homo sapien
acagcaatagtgcagaatccagaatggatgtcctctttgtagccatctttgctgtgccacttatcctgggacaagaatatgaggatgaagaaagactgggagaggatgaatattatcaggtggtctattattatacagtcacccccagttatgatgactttagtgcagatttcaccattgattactccatatttgagtcagaggacaggctgaacaggttggataaggacataacagaagcaatagagactaccattagtcttgaaacagcacgtgcagaccatccgaagcctgtaactgtgaaaccagtaacaacggaacctagtccagatctgaacgatgccgtgtccagtttgcgaagtcctattcccctcctcctgtcgcgtgcctttgttcaggtggggatgtatttcatgtagaaggtggaagaaggctgctatgactctttggatgggagtctggcaagaggaaattggaagataaaataaataataagtgaaataaagaaaaaaaaaaaaa

SEQ ID NO: 2271 - protein, 131 aa, Homo sapien
MDVLFVAIFAVPLILGQEYEDEERLGEDEYYQVVYYYTVTPSYDDFSADFTIDYSIFESEDRLNRLDKDITEAIETTISLETARADHPKPVTVKPVTTEPSPDLNDAVSSLRSPIPLLLSRAFVQVGMYFM

SEQ ID NO: 2272 - DNA, 1511 bp, Homo sapien
gaattccgggcacccctcgagcgagcgagctagccagcaggcatcgagggggcgcggctgccgtccggacgagacaggcgaacccgacgcagaagagtccaccaccggacagtcaggtagccgccgcgtccctcgcacacgcagagtcgggcggcgcggggtctcccttgcgcccggcctccgccctctcctcctctcctttccccttcttctcgctgtcctctcctctctcgctgcccgcgtttgcgcagccccgggccatgtccgacgcgtccctccgcagcacatccacgatggagcgtcttgtcgcccgtgggaccttcccagtactagtgcgcaccagcgcctgccgcagcctcttcgggccggtggaccacgaggagctgagccgcgagctgcaggcccgcctggccgagctgaacgccgaggaccagaaccgctgggattacgacttccagcaggacatgccgctgcggggccctggacgcctgcagtggaccgaagtggacagcgactcggtgcccgcgttctaccgcgagacggtgcaggtggggcgctgccgcctgctgctggcgccgcggcccgtcgcggtcgcggtggctgtcagcccgcccctcgagccggccgctgagtccctcgacggcctcgaggaggcgccggagcagctgcctagtgtcccggtcccggccccggcgtccaccccgcccccagtcccggtcctggctccagccccggccccggctccggctccggtcgcggctccggtcgcggctccggtcgcggtcgcggtcctggccccggccccggccccggccccggctccggctccggccccggctccagtcgcggccccggccccagccccggccccggccccggccccggcccccgccccggccccggccccggacgcggcgcctcaagagagcgccgagcagggcgcgaaccaggggcagcgcggccaggagcctctcgctgaccagctgcactcggggatttcgggacgtcccgcggccggcaccgcggccgccagcgccaacggcgcggcgatcaagaagctgtccgggcctctgatctccgatttcttcgccaagcgcaagagatcagcgcctgagaagtcgtcgggcgatgtccccgcgccgtgtccctctccaagcgccgcccctggcgtgggctcggtggagcagaccccgcgcaagaggctgcggtgagccaatttagagcccaaagagccccgagggaacctgccggggcagcggacgttggaagggcgctgggcctcggctgggaccgttcatgtagcagcaaccggcggcggctgccgcagagcagcgttcggttttgtttttaaattttgaaaactgtgcaatgtattaataacgtctttttatatctaaatgtattctgcacgagaaggtacactggtcccaaagtgtaaagctttaagagtcatttatataaaatgtttaatctctgctgaaactcagtacaaaaaaaccgggattccggcc

SEQ ID NO: 2273 - protein, 316 aa, Homo sapien
MSDASLRSTSTMERLVARGTFPVLVRTSACRSLFGPVDHEELSRELQARLAELNAEDQNRWDYDFQQDMPLRGPGRLQWTEVDSDSVPAFYRETVQVGRCRLLLAPRPVAVAVAVSPPLEPAAESLDGLEEAPEQLPSVPVPAPASTPPPVPVLAPAPAPAPAPVAAPVAAPVAVAVLAPAPAPAPAPAPAPAPVAAPAPAPAPAPAPAPAPAPAPDAAPQESAEQGANQGQRGQEPLADQLHSGISGRPAAGTAAASANGAAIKKLSGPLISDFFAKRKRSAPEKSSGDVPAPCPSPSAAPGVGSVEQTPRKRLR

SEQ ID NO: 2274 - DNA, 3397 bp, Homo sapien
  Unsure 3203: Unknown base
gccggctccagttagagctcgggtctcctcgccacagctccgagtctttcgttctgggaggcccaggcggcttcgcgttctgagaataaacagaacctctgttgctctgcgacttgcaggcactgggagattcgtagctaagacgccagggcatcccggaagctgggaaatgggactgttgacattcagggatgtggccgtagaattctctttggaggagtgggaacacctggaaccagctcagaagaatttgtatcaggatgtgatgttagaaaactacagaaacctggtctctctgggtcttgttgtctctaagccggacctgatcacctttttggaacaaaggaaagagccttggaatgtgaagagtgaggagacagtagccatccagccagatgtgttttcgcattataacaaggacctgttgacagagcactgcacagaagcttcattccaaaaagtgatatcgaggagacatgggagctgtgatcttgagaatttacatttaagaaaaaggtggaaaagggaggagtgtgaagggcacaatggatgttatgatgaaaagacttttaaatatgatcaatttgatgaatcctctgttgaaagtttgtttcaccagcaaatactttcttcttgtgccaaaagctataactttgatcaatataggaaggtctttactcattcatcattgcttaatcaacaagaggaaatagatatttggggaaaacatcacatatatgataaaacttcagtgttatttaggcaggtctctactctaaatagttaccgaaatgtttttattggagagaaaaattatcattgcaataattctgaaaaaaccttgaaccaaagctcaagccctaaaaatcatcaggaaaattattttctagaaaaacaatacaaatgtaaagaatttgaggaagtctttcttcagagtatgcatgggcaagagaaacaagaacagtcttacaaatgtaataaatgtgtagaagtttgtacccagtcattaaaacatattcaacatcagaccatccatatcagagaaaactcatatagctataacaaatatgataaagatcttagtcagtcatcaaatcttagaaagcagataatccataatgaagagaaaccatacaaatgtgaaaaatgtggggatagcttaaaccatagtttgcaccttactcaacatcagatcattcctaccgaagagaaaccctataaatggaaagaatgtggcaaggtctttaaccttaactgtagtttataccttactaaacagcagcaaattgatactggagaaaacctttacaaatgtaaagcatgtagcaaatcttttactcgttcctccaatcttattgtgcatcagagaattcacactggagagaaaccatacaaatgtaaagaatgtggcaaagcctttcgctgtagttcataccttactaaacataagcgaattcatactggagagaaaccttataaatgtaaagaatgtggaaaagcttttaaccgtagttcatgccttactcaacatcagacaactcatacaggagaaaaactttacaaatgtaaagtatgtagcaaatcttatgctcgttcttcaaatcttattatgcatcagagagttcatactggagagaagccttataaatgtaaagaatgtggcaaagtctttagccgtagttcttgccttactcaacatcggaaaattcatactggagaaaatctttacaaatgcaaagtatgtgctaaaccttttacttgtttctcaaatcttattgtgcatgagagaattcatactggagagaaaccctataaatgtaaagaatgtggcaaagcctttccttatagttcacaccttattcgacatcatcgaattcatactggagaaaaaccatacaaatgtaaagcatgtagcaaatcttttagtgactcctcaggtcttactgtgcatcggcgaactcatactggagagaaaccctatacatgtaaagaatgtggcaaagcctttagttatagttcagatgttattcagcatcggagaattcatactggccagagaccctacaaatgtgaagaatgtggcaaagccttcaactataggtcatacctcactacacatcagagaagtcatactggagagagaccctacaaatgtgaagaatgtggcaaagccttcaactataggtcatacctcactacacatcggagaagacatactggagagagaccctacaaatgtgatgaatgtggtaaagccttcagctataggtcatacctcactacacatcggagaagtcatagtggagagagaccctacaaatgtgaagaatgtggcaaagcctttaactctaggtcatacctcattgcacatcagagaagtcatactagagaaaaactttaaaaatgtaaaacatggagcagattttttacttgttacccatgtcttattgtgcatcagataatttatatgggagtgaaaccctacaaatgttaagaatgtggcataacctttaactattttcaagccttacacaatagcagagaatataaactgaaaaaatccatacaaatattaaaaatgtggcaaattattttaaactgtgctcaacccttactcaagataatccatactagagaaacactatagatgtaaaaatgtgaaaagttttattcaaaatatcaaacttatgagtcacctaggggttcatagaaaaaggaagtttgcagatgcaataaatgtgaggaagtatttaataaaaaatgaagtctaaatgtgtcagagaatttatgtgagaaaggactaaagcacagacactttcagcctttatactaaataagagtattttttgtacagaataatctaaaggcaaaataattagataatttatttgcttatatgttttaaagtagcaagaacattgatgttttgacaggtatatttcatagatacttcatttgtatttacagtatttgaggtttttggaaagcaaatattatttatataattcagctttcaaatctgttgctgcttttccttaatccgtggtgttcatgtgaaaatatgtgttctgtttttttttctgcatcagaacaatgtgaggtcattctacgttaatatcattaatatcagcatttttcatggaagtttaatgccaaatgtaaaacacatgaaaatttttaaaaatatgctctttgtgtttgantcattaaacagtaatatgtgtaaacatatagtacatatttagggcattagtattctatactaaagtaaaagaggaatattctgaatttatttattacatcaattgctccttaagtagaaaaacactggtcagttatttaaaatactggcatacctttatagtacaatgaagtagtaatcttggaatattatttg

SEQ ID NO: 2275 - protein, 799 aa, Homo sapien
PAPVRARVSSPQLRVFRSGRPRRLRVLRINRTSVALRLAGTGRFVAKTPGHPGSWEMGLLTFRDVAVEFSLEEWEHLEPAQKNLYQDVMLENYRNLVSLGLVVSKPDLITFLEQRKEPWNVKSEETVAIQPDVFSHYNKDLLTEHCTEASFQKVISRRHGSCDLENLHLRKRWKREECEGHNGCYDEKTFKYDQFDESSVESLFHQQILSSCAKSYNFDQYRKVFTHSSLLNQQEEIDIWGKHHIYDKTSVLFRQVSTLNSYRNVFIGEKNYHCNNSEKTLNQSSSPKNHQENYFLEKQYKCKEFEEVFLQSMHGQEKQEQSYKCNKCVEVCTQSLKHIQHQTIHIRENSYSYNKYDKDLSQSSNLRKQIIHNEEKPYKCEKCGDSLNHSLHLTQHQIIPTEEKPYKWKECGKVFNLNCSLYLTKQQQIDTGENLYKCKACSKSFTRSSNLIVHQRIHTGEKPYKCKECGKAFRCSSYLTKHKRIHTGEKPYKCKECGKAFNRSSCLTQHQTTHTGEKLYKCKVCSKSYARSSNLIMHQRVHTGEKPYKCKECGKVFSRSSCLTQHRKIHTGENLYKCKVCAKPFTCFSNLIVHERIHTGEKPYKCKECGKAFPYSSHLIRHHRIHTGEKPYKCKACSKSFSDSSGLTVHRRTHTGEKPYTCKECGKAFSYSSDVIQHRRIHTGQRPYKCEECGKAFNYRSYLTTHQRSHTGERPYKCEECGKAFNYRSYLTTHRRRHTGERPYKCDECGKAFSYRSYLTTHRRSHSGERPYKCEECGKAFNSRSYLIAHQRSHTREKL

SEQ ID NO: 2276 - DNA, 1508 bp, Homo sapien
gctggaggagcctcgaggctgaggctgccggggggctgtgggctaccgggccgccggcgcctcagcgatgttttactcagggctcctcactgagggcggccgcaaggagaccgacatgcgggaggcggcgtcactgcgacagcagcgccggatgaagcaggcggtgcagttcatccacaaggactccgccgacctgctgcccctggacggcctcaagaagctgggctcgtccaaggacatgcaacctcataatattctgcagaggcgcctcatggaaaccaacctgtctaagctccgaagcggtccccgtgtcccttgggcctctaagacgaacaaactcaatcaggctaagtctgaggggctaaagaagtctgaggaggatgacatgattttggtttcttgccagtgtgctggaaaggatgtgaaagccttggttgacacaggctgcctatataatctcatctctttggcctgtgtggacagattgggactcaaggagcatgtcaaatcccacaagcatgaaggagaaaagctttctctaccccggcatctcaaagtagtgggccagattgagcacctagtgatcacactgggctccctccgcctggactgcccagcagctgtggttgatgacaatgagaaaaacttgtcccttggtctacagactctccgatctctgaagtgcatcataaacttggataagcaccggctgatcatggggaagacagacaaggaagaaatcccttttgtggagacagtctctttgaatgaagacaacacttcagaagcataactacagcctgcagcatgtctgcacgtgtgcatgcatacacaccgggttgacagattgagaaaactgggtttgaaccaaatgccgtagtgacttgctgtggaccaagtccttccatctaatagaagctccaggggctccttcccattcagacctctctagactatagtctatgcttagagatcttgtctggttatggccattgttttttactactttgatcacttaacttatagaccttttttgacactgccagtctcacttgtggcctatttctctgcttcttccaggaatttgcttttattagtcaagtataggggctgccaggttctgtgtctccatagatatatgtgcttcttttcctatagctaaatgtataataaacaggaacctgacctttacctcctttcagctgtttcaaacaggtgccaggatacctatgtcttagaattagagtttcttcaaattgattcattgatttctcaagtatggattatgtgaaagagcccagggacattatccattacagtctaactctttcatttaaaggtccagagaggcaagtgaattgtctaagttcatatattaggtcagtgactgaagggaccaagaacgcagacctgatttccaagccaagactcccatgctgcctcatttgtattcaagcctttaacaggagggcaaagaggtgagaatgtgttaaaaaaaaaaaaaaaaa

SEQ ID NO: 2277 - protein, 241 aa, Homo sapien
MFYSGLLTEGGRKETDMREAASLRQQRRMKQAVQFIHKDSADLLPLDGLKKLGSSKDMQPHNILQRRLMETNLSKLRSGPRVPWASKTNKLNQAKSEGLKKSEEDDMILVSCQCAGKDVKALVDTGCLYNLISLACVDRLGLKEHVKSHKHEGEKLSLPRHLKVVGQIEHLVITLGSLRLDCPAAVVDDNEKNLSLGLQTLRSLKCIINLDKHRLIMGKTDKEEIPFVETVSLNEDNTSEA

SEQ ID NO: 2278 - DNA, 5226 bp, Homo sapien; identical to SEQ ID NO: 1681

SEQ ID NO: 2279 - protein, 701 aa, Homo sapien; identical to SEQ ID NO: 1682

SEQ ID NO: 2280 - DNA, 2113 bp, Homo sapien
ggagttgagaattagggaggaggtggtagagtccgggtagtgagcggagggacaggaagggtagggcaagaaagggagaggggacaggagggaagggtgggccaaagcggtgagaaaggagggccagccagttgggtgggggagagggccgaggcccgggggcaggagtgcagggctctgaggcggggagaggagaggagagaagagccgcggggggcccagcccggagccaggatgcccgcgccgcgcgcccgggagcagccccgcgtgcccggggagcgccagccgctgctgcctcgcggtgcgcggggccctcgacggtggcggcgggcggcgggcgcggccgtgctgctggtggagatgctggagcgcgccgccttcttcggcgtcaccgccaacctcgtgctgtacctcaacagcaccaacttcaactggaccggcgagcaggcgacgcgcgccgcgctggtattcctgggcgcctcctacctgctggcgcccgtgggcggctggctggccgacgtgtacctgggccgctaccgcgcggtcgcgctcagcctgctgctctacctggccgcctcgggcctgctgcccgccaccgccttccccgacggccgcagctccttctgcggagagatgcccgcgtcgccgctgggacctgcctgcccctcggccggctgcccgcgctcctcgcccagcccctactgcgcgcccgtcctctacgcgggcctgctgctactcggcctggccgccagctccgtccggagcaacctcacctccttcggtgccgaccaggtgatggatctcggccgcgacgccacccgccgcttcttcaactggttttactggagcatcaacctgggtgctgtgctgtcgctgctggtggtggcgtttattcagcagaacatcagcttcctgctgggctacagcatccctgtgggctgtgtgggcctggcatttttcatcttcctctttgccacccccgtcttcatcaccaagcccccgatgggcagccaagtgtcctctatgcttaagctcgctctccaaaactgctgcccccagctgtggcaacgacactcggccagagaccgtcaatgtgcccgcgtgctggccgacgagaggtctccccagccaggggcttccccgcaagaggacatcgccaacttccaggtgctggtgaagatcttgcccgtcatggtgaccctggtgccctactggatggtctacttccagatgcagtccacctatgtcctgcagggtcttcacctccacatcccaaacattttcccagccaacccggccaacatctctgtggccctgagagcccagggcagcagctacacgatcccggaagcctggctcctcctggccaatgttgtggtggtgctgattctggtccctctgaaggaccgcttgatcgaccctttactgctgcggtgcaagctgcttccctctgctctgcagaagatggcgctggggatgttctttggttttacctccgtcattgtggcaggagtcctggagatggagcgcttacactacatccaccacaacgagaccgtgtcccagcagattggggaggtcctgtacaacgcggcaccactgtccatctggtggcagatccctcagtacctgctcattgggatcagtgagatctttgccagcatcccaggcctggagtttgcctactcagaggccccgcgctccatgcagggcgccatcatgggcatcttcttctgcctgtcgggggtgggctcactgttgggctccagcctagtggcactgctgtccttgcccgggggctggctgcactgccccaaggactttgggaacatcaacaattgccggatggacctctacttcttcctgctggctggcattcaggccgtcacggctctcctatttgtctggatcgctggacgctatgagagggcgtcccagggcccagcctcccacagccgtttcagcagggacaggggctgaacaggccctattccagcccccttgcttcactctaccggacagacggcagcagtcccagctctggtttccttctcggtttattctgttagaatgaaatggttcccataaataaggggcatgagcccttcctccc

SEQ ID NO: 2281 - protein, 581 aa, Homo sapien
MPAPRAREQPRVPGERQPLLPRGARGPRRWRRAAGAAVLLVEMLERAAFFGVTANLVLYLNSTNFNWTGEQATRAALVFLGASYLLAPVGGWLADVYLGRYRAVALSLLLYLAASGLLPATAFPDGRSSFCGEMPASPLGPACPSAGCPRSSPSPYCAPVLYAGLLLLGLAASSVRSNLTSFGADQVMDLGRDATRRFFNWFYWSINLGAVLSLLVVAFIQQNISFLLGYSIPVGCVGLAFFIFLFATPVFITKPPMGSQVSSMLKLALQNCCPQLWQRHSARDRQCARVLADERSPQPGASPQEDIANFQVLVKILPVMVTLVPYWMVYFQMQSTYVLQGLHLHIPNIFPANPANISVALRAQGSSYTIPEAWLLLANVVVVLILVPLKDRLIDPLLLRCKLLPSALQKMALGMFFGFTSVIVAGVLEMERLHYIHHNETVSQQIGEVLYNAAPLSIWWQIPQYLLIGISEIFASIPGLEFAYSEAPRSMQGAIMGIFFCLSGVGSLLGSSLVALLSLPGGWLHCPKDFGNINNCRMDLYFFLLAGIQAVTALLFVWIAGRYERASQGPASHSRFSRDRG

SEQ ID NO: 2282 - DNA, 1619 bp, Homo sapien
aacattcctgcaaatggtttcaatatatgcagatgtctcgatataggaatgaaattacgtctttggaacaacttaaataagtcaaatatacttggagctttaaaaattaaaaggagagagattcgagcaccttttctgctgccatgacaaccatgcaaggaatggaacaggccatgccaggggctggccctggtgtgccccagctgggaaacatggctgtcatacattcacatctgtggaaaggattgcaagagaagttcttgaagggagaacccaaagtccttggggttgtgcagattctgactgccctgatgagccttagcatgggaataacaatgatgtgtatggcatctaatacttatggaagtaaccctatttccgtgtatatcgggtacacaatttgggggtcagtaatgtttattatttcaggatccttgtcaattgcagcaggaattagaactacaaaaggcctggtccgaggtagtctaggaatgaatatcaccagctctgtactggctgcatcagggatcttaatcaacacatttagcttggcgttttattcattccatcacccttactgtaactactatggcaactcaaataattgtcatgggactatgtccatcttaatgggtctggatggcatggtgctcctcttaagtgtgctggaattctgcattgctgtgtccctctctgcctttggatgtaaagtgctctgttgtacccctggtggggttgtgttaattctgccatcacattctcacatggcagaaacagcatctcccacaccacttaatgaggtttgaggccaccaaaagatcaacagacaaatgctccagaaatctatgctgactgtgacacaagagcctcacatgagaaattaccagtatccaacttcgatactgatagacttgttgatattattattatatgtaatccaattatgaactgtgtgtgtatagagagataataaattcaaaattatgttctcatttttttccctggaactcaataactcatttcactggctctttatcgagagtactagaagttaaattaataaataatgcatttaatgaggcaacagcacttgaaagtttttcattcatcataagaactttatataaaggcattacattggcaaataaggtttggaagcagaagagcaaaaaaaagatattgttaaaatgaggcctccatgcaaaacacatacttccctcccatttatttaactttttttttctcctacctatggggaccaaagtgctttttccttcaggaagtggagatgcatggccatctccccctccctttttccttctcctgcttttctttccccatagaaagtaccttgaagtagcacagtccgtccttgcatgtgcacgagctatcatttgagtaaaagtatacatggagtaaaaatcatattaagcatcagattcaacttatattttctatttcatcttcttcctttcccttctcccaccttctactgggcataattatatcttaatcatatatggaaatgtgcaacatatggtatttgttaaatacgtttgtttttattgcagagcaaaaataaatcaaattagaagcaataaaaaaaaaaaaaaaaaaaa

SEQ ID NO: 2283 - protein, 220 aa, Homo sapien
MTTMQGMEQAMPGAGPGVPQLGNMAVIHSHLWKGLQEKFLKGEPKVLGVVQILTALMSLSMGITMMCMASNTYGSNPISVYIGYTIWGSVMFIISGSLSIAAGIRTTKGLVRGSLGMNITSSVLAASGILINTFSLAFYSFHHPYCNYYGNSNNCHGTMSILMGLDGMVLLLSVLEFCIAVSLSAFGCKVLCCTPGGVVLILPSHSHMAETASPTPLNEV

SEQ ID NO: 2284 - DNA, 1530 bp, Homo sapien
gtgctctgcacccagctccttcccgggcgcgcacacgcgcttcctctcttgagctcccgggcgtccggaggcgaaggtcccggagcgttcacgagaatccgggtcccggcgagtccggggtccgctcctccagctgcgcccagggcgcacgagccggccagcctcggggagagggcgcgggggcgctgggggttcttacgggaagatgaggaagcccgacagcaagatcgtgctcctgggggacatgaacgtggggaagacgtcgctgctgcagcggtatatggagcggcgcttcccggacacggtcagcacggtgggcggcgccttctacctgaagcagtggcgctcctacaacatctccatctgggacaccgcagggcgggagcagttccacggcctgggatccatgtactgccggggggcggccgccatcatcctcacctatgatgtgaatcaccggcagagcctggtggagctggaggaccggttcctgggcctgacagacacagccagcaaagactgcctcttcgccatcgtggggaacaaagtggacctcactgaggagggggccttggcgggccaggagaaggaagagtgcagtcccaatatggacgctggggaccgtgtctccccaagggcacctaagcaggtgcagctggaggatgcggtggccctttataaaaagatcctcaagtacaagatgctggatgagcaggatgtgccggccgctgagcaaatgtgctttgagaccagcgccaagaccggctacaatgtggacctcctgtttgagaccctctttgacctggtggtgccaatgatcttacagcagagagctgagaggccgtcacacacagtggatatatccagtcataagccacccaagaggaccagatctgggtgttgtgcctgactttcgagggcctcctggactcagactgtgcatgttgggaaggggtctgaccaggcaagctgtgatctgaaaggagcaaggaacagcaaggaattattttccagaatgacacccgcagcagaatgttggagtggaaatgatggctggctatgaagaggaggtcaacgtgtgtggtctcctcagtctctgtcagaggggtggggaggtgggaaacaggaatcctctgcaaagcccaatctgcagagtcgagacccctggtgctctctgccccgctgcctggcactggtcctttgcagccagccaccaacggcccccttgcccttgcagaggcagaagcctgcgtctgcacctgcacctctgaccgtttcagcaccctgggttgttaccacgtcctacaactctgacatttcttgttctcaagcgtttctcttcactgtgagttgtctttggtcctcccacttggtacttgtatcttgatgctttataatcctgactctcgacgtgttcatttatacaaaatcaggaataactttgtttttatactgattgcagcaatgttggctacatgtattattaaagaggatttttggaacaacttaaaaaaaaaaaaaaaaaaaaaa

SEQ ID NO: 2285 - protein, 234 aa, Homo sapien
MRKPDSKIVLLGDMNVGKTSLLQRYMERRFPDTVSTVGGAFYLKQWRSYNISIWDTAGREQFHGLGSMYCRGAAAIILTYDVNHRQSLVELEDRFLGLTDTASKDCLFAIVGNKVDLTEEGALAGQEKEECSPNMDAGDRVSPRAPKQVQLEDAVALYKKILKYKMLDEQDVPAAEQMCFETSAKTGYNVDLLFETLFDLVVPMILQQRAERPSHTVDISSHKPPKRTRSGCCA

SEQ ID NO: 2286 - DNA, 1335 bp, Homo sapien
tttagtttaaaaagaaaaaatgcagggtgatttcttattattatatgttagcctgcatggttaaattcgacaacttgtaactctatgaacttagagtttactattttagcagctaaaaatgcatcacatattcatattgttcaataatgtcctttcatttgtttctgattgttttcatcctgatactgtagttcactgtagaaatgtggctgctgaaactcatttgattgtcatttttatctatcctatgttaaatggtttgtttttacaaaataataccttattttaattgaaacgtttatgcttttgccaacacatcttgtaacttaatatactagatgttaaggttgttaatgtacaaaaaaaaaacccttatactcacctgcgttttcatttgtttgacatttgtctattattggatttcattatcatatgaacttgtcagtgggaaacaaactgtctaaaaatttttctcttacgtttaacatacaatcatgtgaaatttaggcagagttcgataaattactggcaaaaacaaaactcttttataaagattttctaatgttgactttaatactctaacatggtacaaaccaaatggtaaaatcccaagtcatttcttttttcatctctattcagcaacagaattaagtggatgaagatattctactgtgcattaaatcttgaactttataaaacatgtacaaaaattgtacaagataagttccacctggtaatgtctttccctaatacagggttgcgcttgcattggaccctagggatttgcactaaaattatatcaaggtctcagatgagcttagtgcacaagcactatcactttaaatactattatttgctaccacagcaactatatatttccatagcttttggctgggggcgggggacatttttattacaacttgaaattgctttgctggtttcatatttatttgttgtatttaaaaaatacattgttgtaagagtgattttttcaatatattttattcctgggggggatcatgctacactctcaaaagaaaattaagaaatcattcagatcatcccccctttttaagtagtgtgaattgcaaaacccaacatatttttttttactgtcagttgcggtttatttattctttaactgtctgttttagtagtttaatgattatgaaaaatgtatctgtgtgtgatttgctatttattaaattttaagtactttgctgaatgtcattttaaagcatgtttgaagtcttgtgtatttgtctgtgttaatgctgtcaggaggaactgactaagatgttttaatatgtatcaaaaattaaaatgatttttttt

SEQ ID NO: 2287 - protein, 129 aa, Homo sapien
MKIFYCALNLELYKTCTKIVQDKFHLVMSFPNTGLRLHWTLGICTKIISRSQMSLVHKHYHFKYYYLLPQQLYISIAFGWGRGTFLLQLEIALLVSYLFVVFKKYIVVRVIFSIYFIPGGDHATLSKEN

SEQ ID NO: 2288 - DNA, 1687 bp, Homo sapien
ggggagcctttggagagaagggagagggcccgtcggacagccacagcggccagcgcagcggcagcggcggcggcaccaccatcaccgctcgcaccccagccgcccggcccgcgaccaggcagcggcggccgccggcgggatcggaggaggcggcgaagcgactccgatcctccctctgagccttgctcagctctgccccgcgcctcccgggctccggtccgcgcggcggggtccctgctcctgcgccccgggcgcgcttcccggacaccccggtccccgcagccaggacaaagccatgaagccagcgctgctggaagtgatgaggatgaacagaatctgccggatggtgctggccacttgcttgggatcctttatcctggtcatcttctatttccaaagtatgttgcacccagtcatgcggaggaatccctttggtgtggacatctgctgccggaaggggtcccgaagccccctgcaggaactctacaacccaatccagctggagctctcaaacactgctgtcctgcaccagatgcggcgggaccaggtgacagacacgtgccgagccaacagcgccacaagccgtaagcggagggtgctgacccccaacgacctgaagcacttggtggtggatgaggaccacgagctcatctactgctacgtgcccaaggtggcctgcaccaactggaagcggctcatgatggtcctgaccgggcgggggaagtacagcgaccccatggagatcccggccaacgaggcacacgtctccgccaacctgaagaccctgaaccagtacagcatcccagaaatcaaccaccgcttgaaaagctacatgaagttcctgtttgtccgggagcccttcgagaggctagtgtccgcctaccgcaacaagttcacccagaagtacaacatctccttccacaagcggtacggcaccaagatcatcaaacgccagcggaagaacgccacccaggaggccctgcgcaaaggggacgatgtcaaattcgaggagtttgtggcctatctcatcgacccacacacccagcgggaggagcctttcaacgaacactggcaaaccgtctactcactctgccatccctgccacatccactatgacctcgtgggcaagtacgagacactggaagaggattctaattacgtcctgcagctggcaggagtgggcagctacctgaagttccccacctatgcaaagtctacgagaactactgatgaaatgaccacagaattcttccagaacatcagctcagagcaccaaacgcagctgtacgaagtctacaaactcgattttttaatgttcaattactcagtgccaagctacctgaaattggaataaagggggtggggagagggagagaatcatgctttttaatttaagatttttatttgtcaaaagaattatatggatattgggttattttgtaaattaatatttctttggggatgatgctgcgagcagcatagtgagaattatttaaaatccttcgtagggaaggacagctgtctttgcaggggaaataggatgggtcgttcttgtctgtagaagtgaatactgcaacactgtctcaaaggtttcttgtgttctggtgaattccatgaattgtgcattccataaattctaattaatattatttatagcaaaaaaaaaaaaaaaaaaaaaaaaaaaaaa

SEQ ID NO: 2289 - protein, 352 aa, Homo sapien
MKPALLEVMRMNRICRMVLATCLGSFILVIFYFQSMLHPVMRRNPFGVDICCRKGSRSPLQELYNPIQLELSNTAVLHQMRRDQVTDTCRANSATSRKRRVLTPNDLKHLVVDEDHELIYCYVPKVACTNWKRLMMVLTGRGKYSDPMEIPANEAHVSANLKTLNQYSIPEINHRLKSYMKFLFVREPFERLVSAYRNKFTQKYNISFHKRYGTKIIKRQRKNATQEALRKGDDVKFEEFVAYLIDPHTQREEPFNEHWQTVYSLCHPCHIHYDLVGKYETLEEDSNYVLQLAGVGSYLKFPTYAKSTRTTDEMTTEFFQNISSEHQTQLYEVYKLDFLMFNYSVPSYLKLE

SEQ ID NO: 2290 - DNA, 1534 bp, Homo sapien
tttgcgctcggggaattaaaagaggggaaaaaaagcccgaagaaaactcacgccccaaacaaaacgcaaggagaggagggcgcgcggcctgcagccctcgcccgcgtccccggccgcggcgtgatgcgcgcggaccagcccgcgacgcccgggctgccgctgtccccgcacctggacgctggcgcggtggccgcgccccagcctcgatcgctcgccgcggcgactcggccccaggcttccggcgccggtgggggccctcgctctccatggggctgagggactggctgagaaccgtgtgctgctgctgccggtgcgagtgcttggaggagcgcgccctgcctgagaaggagcccctcgtcagtgataacaatccatattcctcatttggagcaactctggtgagggatgatgagaagaatttatggagtatgccccatgatgtgtcccacacagaggcagacgacgacagaaccctgtacaatttgatagtcattcgtaatcagcaggccaaagactcagaggagtggcagaagctcaactatgatatccataccctgcggcaggttcgaagggaagtaagaaacagatggaagtgcatcttagaagatttaggttttcaaaaggaagctgactctttgttgtcagtgactaaactcagcaccatcagtgattctaaaaacacaaggaaagctcgagagatgttgttaaaactggctgaagaaaccagtattttcccaacaagttgggagctctcagagagatatctctttgttgtggaccgtctcattgcacttgatgctgcagaagagttctttaagcttgctcgtcgaacttaccccaagaagcctggggttccatgcctggcagatggccagaaagaactgcacctgtggggggacctctcatgcagacttgcacatatgcagggagtattgcactgaagatctttgctggaccttcttctcttcagaagataattttcaaaagggagcaatgctgtgaatgcagcttgcttctctctacagattgagaagtccagcttcaaaagttacttgccacttaagcaaggaacttgtcaagagatcatggttcatgttactgaaaagactttaaggatttgtaaggttaatccatagattgctgagaacaatggaaatatttttatttttacagattttgcacttctgaattcaggttaaaaactaacttgtatttagtctgcttagaggactgtgacttgaaaatttttatataccaatgagctttttggtagcgtccacaatgtttaaaatatttcataggcgagatccgtgttctccatttattaatgcattgtagaccaatttaactgctgtgtttcaggaaaattcttcctagtttaataagcaagctaaaagttttattttttatatttagtgcttaatctttgcctcatgttatgtaaaattagcctgcagatattttctctcaattctgtagactctcgcaagataaacattcaaacagtgaaacaaacaataaaataaataaacct

SEQ ID NO: 2291 - protein, 224 aa, Homo sapien
MGLRDWLRTVCCCCRCECLEERALPEKEPLVSDNNPYSSFGATLVRDDEKNLWSMPHDVSHTEADDDRTLYNLIVIRNQQAKDSEEWQKLNYDIHTLRQVRREVRNRWKCILEDLGFQKEADSLLSVTKLSTISDSKNTRKAREMLLKLAEETSIFPTSWELSERYLFVVDRLIALDAAEEFFKLARRTYPKKPGVPCLADGQKELHLWGDLSCRLAHMQGVLH

SEQ ID NO: 2292 - DNA, 1026 bp, Homo sapien
gagagctggctgcgccgagccccctgcgcgctgcacatggggcgcctgacggaagcggcggcagcgggcagcggctctcgggctgcaggctgggcagggtcccctcccacgctcctgccgctgtctcccacgtcccccaggtgcgcggccaccatggcgtccagcgacgaggacggcaccaacggcggcgcctcggaggccggcgaggaccgggaggctcccggcaagcggaggcgcctggggttcttggccaccgcctggctcaccttctacgacatcgccatgaccgcggggtggttggttctagctattgccatggtacgtttttatatggaaaaaggaacacacagaggtttatataaaagtattcagaagacacttaaatttttccagacatttgccttgcttgagatagttcactgtttaattggaattgtacctacttctgtgattgtgactggggtccaagtgagttcaagaatctttatggtgtggctcattactcacagtataaaaccaatccagaatgaagagagtgtggtgctttttctggtcgcgtggactgtgacagagatcactcgctattccttctacacattcagccttcttgaccacttgccatacttcattaaatgggccagatataatttttttatcatcttatatcctgttggagttgctggtgaacttcttacaatatacgctgccttgccgcatgtgaagaaaacaggaatgttttcaataagacttcctaacaaatacaatgtctcttttgactactattattttcttcttataaccatggcatcatatatacctttgtttccacaactctattttcatatgttacgtcaaagaagaaaggtgcttcatggagaggtgattgtagaaaaggatgattaaatgatctctgcaaacaaggtgctttttccagaataaccaagattacctgagtccaagttttaataacaagaataaacaactttgtgaaatatcaaaaaaaaaaaaaaaaaaaaaaaaaaaaaa

SEQ ID NO: 2293 - protein, 288 aa, Homo sapien
MGRLTEAAAAGSGSRAAGWAGSPPTLLPLSPTSPRCAATMASSDEDGTNGGASEAGEDREAPGKRRRLGFLATAWLTFYDIAMTAGWLVLAIAMVRFYMEKGTHRGLYKSIQKTLKFFQTFALLEIVHCLIGIVPTSVIVTGVQVSSRIFMVWLITHSIKPIQNEESVVLFLVAWTVTEITRYSFYTFSLLDHLPYFIKWARYNFFIILYPVGVAGELLTIYAALPHVKKTGMFSIRLPNKYNVSFDYYYFLLITMASYIPLFPQLYFHMLRQRRKVLHGEVIVEKDD

SEQ ID NO: 2294 - DNA, 1289 bp, Homo sapien
agaaaccgttgatgggactgagaaaccagagttaaaacctctttggagcttctgaggactcagctggaaccaacgggcacagttggcaacaccatcatgacatcacaacctgttcccaatgagaccatcatagtgctcccatcaaatgtcatcaacttctcccaagcagagaaacccgaacccaccaaccaggggcaggatagcctgaagaaacatctacacgcagaaatcaaagttattgggactatccagatcttgtgtggcatgatggtattgagcttggggatcattttggcatctgcttccttctctccaaattttacccaagtgacttctacactgttgaactctgcttacccattcataggaccctttttttttatcatctctggctctctatcaatcgccacagagaaaaggttgaccaagcttttggtgcatagcagcctggttggaagcattctgagtgctctgtctgccctggtgggtttcattatcctgtctgtcaaacaggccaccttaaatcctgcctcactgcagtgtgagttggacaaaaataatataccaacaagaagttatgtttcttacttttatcatgattcactttataccacggactgctatacagccaaagccagtctggctggatctctctctctgatgctgatttgcactctgctggaattctgcctagctgtgctcactgctgtgctgcggtggaaacaggcttactctgacttccctggggtgagtgtgctggccggcttcacttaaccttgcctagtgtatcttatccctgcactgtgttgagtatgtcaccaagagtggtagaaggaacaaccagccaatcacgagatcacatgggagggcatttgcattgtgatggaagacagagaagaaaagcagatggcaattgagtagctgataagctgaaaattcactggatatgaaaatagttaatcatgagaaatcaactgattcaatcttcctattttgtcagcgaagggaatgagactctgggaagttaaatgactggcctggcattatgctatgagtttgtgcctttgctgaggacactagaacctggcttgcctcccttataagcagaaacaatttctgccacaaccactagtctctttaatagtattgacttggtaaagggcatttacacacgtaactggatccagtgaatgtcttatgctctgcatttgcccctggtgatcttaaaattcgtttgcctttttaaagctatattaaaaatgtattgttgaatcaaaaaaaaaaaaaaa

SEQ ID NO: 2295 - protein, 225 aa, Homo sapien [sequence omitted]

SEQ ID NO: 2296 - DNA, 2636 bp, Homo sapien
gcttcccggaagtggcggcgcggtcagggctggccttggcttcagctgcggttttggggtcccggactctgggatcggcggcgctatgagttctttcgaggggcagatggccgagtatccaactatctccatagaccgcttcgatagggagaacctgagggcccgcgcctacttcctgtcccactgccacaaagatcacatgaaaggattaagagcccctaccttgaaaagaaggttggagtgcagcttgaaggtttatctatactgttcacctgtgactaaggagttgttgttaacgagcccgaaatacagattttggaagaaacgaattatatctattgaaatcgagactcctacccagatatctttagtggatgaagcatcaggagaggtttttatttcagggcaataatggaactgtcctgtacacaggagacttcagattggcgcaaggagaagctgctagaatggagcttctgcactccgggggcagagtcaaagacatccaaagtgtatatttggatactacgttctgtgatcgaagattttaccaaattccaagtcgggaggagtgtttaagtggagtcttagagctggtccgaagctggatcactcggagcccgtaccatgttgtgtggctgaactgcaaagcggcttatggctatgaatatctgttcaccaaccttagtgaagaattaggggtccaggttcatgtgaataagctagacatgtttaggaacatgcctgagatccttcatcatctcacaacagaccgcaacactcagatccatgcatgccggcatcccaaggcagaggaatattttcagtggagcaaattaccctgtggaattacttccagaaatagaattccactccacataatcagcattaagccatccaccatgtggtttggagaaaggagcagaaaaacaaatgtaattgtgaggactggagagagttcatacagagcttgtttttcttttcactcctcctacagtgagattaaagatttcttgagctacctctgtcctgtgaacgcatatccaaatgtcattccagttggcacaactatggataaagttgtcgaaatcttaaagcctttatgccggtcttcccaaagtacggagccaaagtataaaccactgggaaaactgaagagagctagaacagttcaccgagactcagaggaggaagatgactatctctttgatgatcctctgccaatacctttaaggcacaaagttccatacccggaaacttttcaccctgaggtattttcaatgactgcagtatcagaaaagcagcctgaaaaactgagacaaaccccaggatgctgcagagcagagtgtatgcagagctctcgtttcacaaactttgtagattgtgaagaatccaacagtgaaagtgaagaagaagtaggaatcccagcttcactgcaaggagatctgggctctgtacttcacctgcaaaaggctgatggggatgtaccccagtgggaagtattctttaaaagaaatgatgaaatcacagatgagagtttggaaaacttcccttcctccacagtggcagggggatctcagtcaccaaagcttttcagtgactctgatggagaatcaactcacatctcctcccagaattcttcccagtcaacacacataacagaacaaggaagtcaaggctgggacagccaatctgatactgttttgttatcttcccaagagagaaacagtggggatattacttccttggacaaagctgactacagaccaacaatcaaagagaatattcctgcctctctcatggaacaaaatgtaatttgcccaaaggatacttactctgatttgaaaagcagagataaagatgtgacaatagttcctagtactggagaaccaactactctaagcagtgagacacatatacccgaggaaaaaagtttgctaaatcttagcacaaatgcagattcccagagctcttctgattttgaagttccctcaactccagaagctgagttacctaaacgagagcatttacaatatttatatgagaagctggcaactggtgagagtatagcagtcaaaaaaagaaaatgctcactcttagatacctaagaattcaaagcgtttcaacctagagcaaccactaaaaaacctgcacagagatgacagtcaatattacaatagagaaaatacagtacttaaaaatgttcaaataacctggttgggtgtggtggctcacacttgtaatcccagcactttgaggtgggcaatggcttgagcccaggagttcgacaccagcctggccaacacagtgaaatgtgtctctacttacaaaaaaaaaaaaaaaaaaaaagccaggcatggtggtgggctactctggaggcccttgaggaccacttgagcccaggagattgaggctgcagtgagccatgactgtgccactgcacctctagtctgggtgacagagcaagaccctgtttaaaaaagaaaaaggccaggcacggtggctcatgcctgtaatcccagctacgcaggaggccaaggcaggagaatcacttgaacctgggaggtggtggttgcagtgagctgagattgtgtcattgcactccagcctgggcaacaagagcaaaactctgtctc

SEQ ID NO: 2297 - protein, 577 aa, Homo sapien
MKHQERFLFQGNNGTVLYTGDFRLAQGEAARMELLHSGGRVKDIQSVYLDTTFCDRRFYQIPSREECLSGVLELVRSWITRSPYHVVWLNCKAAYGYEYLFTNLSEELGVQVHVNKLDMFRNMPEILHHLTTDRNTQIHACRHPKAEEYFQWSKLPCGITSRNRIPLHIISIKPSTMWFGERSRKTNVIVRTGESSYRACFSFHSSYSEIKDFLSYLCPVNAYPNVIPVGTTMDKVVEILKPLCRSSQSTEPKYKPLGKLKRARTVHRDSEEEDDYLFDDPLPIPLRHKVPYPETFHPEVFSMTAVSEKQPEKLRQTPGCCRAECMQSSRFTNFVDCEESNSESEEEVGIPASLQGDLGSVLHLQKADGDVPQWEVFFKRNDEITDESLENFPSSTVAGGSQSPKLFSDSDGESTHISSQNSSQSTHITEQGSQGWDSQSDTVLLSSQERNSGDITSLDKADYRPTIKENIPASLMEQNVICPKDTYSDLKSRDKDVTIVPSTGEPTTLSSETHIPEEKSLLNLSTNADSQSSSDFEVPSTPEAELPKREHLQYLYEKLATGESIAVKKRKCSLLDT

SEQ ID NO: 2298 - DNA, 3401 bp, Homo sapien
aaaatttgaagacaagatgggcacctactctacaattctgataaaaacagaggtcatcgaatgtgggaactactgtggagtacgcatcattcactctttgattgcagagttctcactggaagaattgaagaaaagctatcacctgaataaaagtcaaattatgttggatatgctaactgagaatttgttcttcgatactggtatgggaaaaagtaaatttttgcaagatatgcacacactcctactcacaagacaccgcgatgaacatgaaggtgaaacaggaaattggttttccccatttattgaagcattacataaagatgaaggaaatgaagcagttgaagctgtattgcttgaaagtatccatcggttcaacccaaatgcattcatttgccaagcgttggcaagacatttctacattaaaaagaaggactttggcaatgctctaaactgggcaaaacaagcaaaaatcatagaacctgacaattcttatatctcagatacactgggtcaagtctacaaaagtaaaataagatggtggatagaggaaaacggaggaaacgggaacatttcagttgatgatctaattgctcttttggatttagcagaacatgcctcaagtgcattcaaagaatctcaacagcaaagtgaagatagagagtatgaagtgaaggaaagattgtatccgaagtcaaaaaggcggtatgatacttacaatatagctggttatcaaggagagatagaagttgggctttacacaatccaaattctccagctcattcctttttttgataataaaaatgagctatctaaaagatatatggtcaattttgtatcaggaagtagtgatattccaggggatccaaacaatgaatataaattagccctcaaaaactatattccttatttaactaaattgaaattttctttgaaaaagtcctttgatttttttgatgaatactttgtcctgctaaaacccaggaacaatattaagcaaaatgaagaggccaaaactcggagaaaggtggctggatattttaagaaatatgtagatatattttgtctcttagaagaatcacaaaacaacacaggtcttggatcaaagttcagtgagccacttcaagtagagagatgcaggagaaacctagtagctttaaaagcagacaagttttctgggctcttggaatatcttatcaaaagtcaagaggatgctataagcactatgaaatgtatagtgaacgaatatacttttctcttagaacaatgcactgtcaaaatccagtcaaaagaaaagctaaatttcatcttggccaacattattctctcctgtatccaacctacctccagattagtaaagccagttgaaaaactaaaagatcagcttcgagaagtcttgcaaccaataggactgacttatcagttttcagaaccgtattttctagcttccctcttattctggccagaaaatcaacaactagatcaacattctgaacaaatgaaagagtatgctcaagcactaaaaaattctttcaaggggcaatataaacatatgcatcgtacaaagcaaccaattgcatatttctttcttggaaaaggtaaaagactggaaagacttgttcacaaaggaaaaattgaccagtgctttaagaagacaccagatattaattccttgtggcagagtggagatgtgtggaaggaggaaaaagtccaagaacttttgcttcgtttacaaggtcgagctgaaaacaattgtttatatatagaatatggaatcaatgaaaaaatcacaatacccatcactcccgcttttttaggtcaacttagaagtggcagaagcatagagaaggtgtctttttacctgggatttcccattggaggcccacttgcttatgacattgaaattgtttaagagcctgatattcttcctccaagaatttgatctcagtacccatttaatttttttggactcaagatctatgctttaaaccggcaaggttatagatacagcctctagctcttcagatctgtacatgcagtatttaatttcctcttaaacatgttatgagttctacaaggacaatagtgaaaaaggaaggagtgagatatatgaaaagtagcaaatatgttccttggtttggttaacatcattgatgacaaaataataaggagctatgactggagtcaggagaagttagtgtaataagctggctacacagaaccccactacttaccaggcatggattgaagaagattgtctactcaaatggcatttagacattagaatgtctgggaaaatatttctcaaagacagcaaaaacctctcaaactgaggagcaacatttattcttactaagcagatcatcaatgtatcatgtgcttggcactcaaggatcttccaaaacagaggaccaaccagtcttctgaaggtcatgcccacagaagtcatcggaccttaccaaagtaggttggagaattagattgccttttcatgcagtgagattcagttaagcaaaaatgaaatttgtctctatagctaattagcttatcaactcccctccaaacaaacaattaaaaaaaaaacatacagacactcaaattccacaagctaatgaacaaaagggactcttgtgagaagactaatgagtccctcatccagaagatgccaatgtactggcagattaacatacaacctatgttttgaacaaaaacaaccagcgatacgtaatcaaaatgtaattttcccctaataaaattatggatatgggcagtcatcaatggctgccaaaaccattaagtggaaagctgattaaaaaacaaaaatttctaatggatttatcaaactgtcccaaatcctgataaatattaacatcacagaggaagaccagacattatgggcctggaagtactataggagtgcacacatcacccgtgacatggtcttgccaaataattaaacctgaatttgatcaggtctctggatcttatttgcaattcaaaagaaattttaaaaaaatcctactaacaccaccacaaatatgcaatcagcaatatccagaaaggggaaattcacaggacaaaaacctggttttcttttttggtttcttcaaccaaaaaagaaagaaattgcaaaggaccaaaaaaatgttggggaatctatacattataagggacttaacaactaaagggcaacatatagactttagatcctaatttgagcaaaatctaaaatcaattattaggcaatcagaaaaatttgaacacagactagatatttgaggatattaaggtactatattattgaagattccatggttatgttttttaaagagttcatgccttttagagatacatactaaagtatttgtaaataaatgacatgatctagaaaaaaaaaaaaaaaa

SEQ ID NO: 2299 - protein, 630 aa, Homo sapien
MGTYSTILIKTEVIECGNYCGVRIIHSLIAEFSLEELKKSYHLNKSQIMLDMLTENLFFDTGMGKSKFLQDMHTLLLTRHRDEHEGETGNWFSPFIEALHKDEGNEAVEAVLLESIHRFNPNAFICQALARHFYIKKKDFGNALNWAKQAKIIEPDNSYISDTLGQVYKSKIRWWIEENGGNGNISVDDLIALLDLAEHASSAFKESQQQSEDREYEVKERLYPKSKRRYDTYNIAGYQGEIEVGLYTIQILQLIPFFDNKNELSKRYMVNFVSGSSDIPGDPNNEYKLALKNYIPYLTKLKFSLKKSFDFFDEYFVLLKPRNNIKQNEEAKTRRKVAGYFKKYVDIFCLLEESQNNTGLGSKFSEPLQVERCRRNLVALKADKFSGLLEYLIKSQEDAISTMKCIVNEYTFLLEQCTVKIQSKEKLNFILANIILSCIQPTSRLVKPVEKLKDQLREVLQPIGLTYQFSEPYFLASLLFWPENQQLDQHSEQMKEYAQALKNSFKGQYKHMHRTKQPIAYFFLGKGKRLERLVHKGKIDQCFKKTPDINSLWQSGDVWKEEKVQELLLRLQGRAENNCLYIEYGINEKITIPITPAFLGQLRSGRSIEKVSFYLGFPIGGPLAYDIEIV

SEQ ID NO: 2300 - DNA, 1041 bp, Homo sapien
tgacatgcctgatcctctcttttctgcagttcaagggaaagacgagatcttgcacaaggcactctgcttctgcccttggctggggaagggtggcatggagcctctccggctgctcatcttactctttgtcacagagctgtccggagcccacaacaccacagtgttccagggcgtggcgggccagtccctgcaggtgtcttgcccctatgactccatgaagcactgggggaggcgcaaggcctggtgccgccagctgggagagaagggcccatgccagcgtgtggtcagcacgcacaacttgtggctgctgtccttcctgaggaggtggaatgggagcacagccatcacagacgataccctgggtggcactctcaccattacgctgcggaatctacaaccccatgatgcgggtctctaccagtgccagagcctccatggcagtgaggctgacaccctcaggaaggtcctggtggaggtgctggcagaccccctggatcaccgggatgctggagatctctggttccccggggagtctgagagcttcgaggatgcccatgtggagcacagcatctccaggagcctcttggaaggagaaatccccttcccacccacttccatccttctcctcctggcctgcatctttctcatcaagattctagcagccagcgccctctgggctgcagcctggcatggacagaagccagggacacatccacccagtgaactggactgtggccatgacccagggtatcagctccaaactctgccagggctgagagacacgtgaaggaagatgatgggaggaaaagcccaggagaagtcccaccagggaccagcccagcctgcatacttgccacttggccaccaggactccttgttctgctctggcaagagactactctgcctgaacactgcttctcctggaccctggaagcagggactggttgagggagtggggaggtggtaagaacacctgacaacttctgaatattggacattttaaacacttacaaataaatccaagactgtcatatttaaaaa

SEQ ID NO: 2301 - protein, 230 aa, Homo sapien
MEPLRLLILLFVTELSGAHNTTVFQGVAGQSLQVSCPYDSMKHWGRRKAWCRQLGEKGPCQRVVSTHNLWLLSFLRRWNGSTAITDDTLGGTLTITLRNLQPHDAGLYQCQSLHGSEADTLRKVLVEVLADPLDHRDAGDLWFPGESESFEDAHVEHSISRSLLEGEIPFPPTSILLLLACIFLIKILAASALWAAAWHGQKPGTHPPSELDCGHDPGYQLQTLPGLRDT

SEQ ID NO: 2302 - DNA, 1868 bp, Homo sapien
ccatttaaagaagatgctcggccttaaaggaaatggcggtgcggttctgtccatggcccttccttttcagccagagcagagagattcagaggatttattgaagaattttaattcagagtgtgatacacactgtggccttgatactgcacgacaagaatatttgggtaactcattaagacaggaatcagacttgaaaaaatccacctcgtcagataattcaagctctcatcatggtgaaaataaacaaaatctgactgttgatccctgtgacattttgggtggagttgataatcagcaaagactgctacacattgtctggcctcacaggtgggagcatgataaagatccagaaagcttttttaaggtattaatgcatcttaaagacttaggactcaatttccacgtgtctgtacttggagaaaccttcacagatgtcccagatattttttcagaggccaaaaaggcattgggatcttctgtcttacactggggctacttacccagcaaagatgactacttccaagtactgtgcatggctgatgttgtcatctcaacagctaagcatgaattctttggagtggcaatgttggaagctgtgtactgtgggtgttacccactttgtcctaaagatttggtttatcccgaaatatttccagctgaatatctgtattctacacctgaacagctttcaaaaaggctccagaatttctgcaagagaccagatattataagaaaacatctctataagggtgaaatcgctccgttttcttgggcagccctacatggtaaattcaggtctctgcttacaacagagcctagggaagatttgtgacagatggggctaagtcacaaacttgcagcctaaggcagaatctgaagaactttccagagtgtgcccatatttacctgatcagagagaaaagaaaatctgcagaggaagctgagcctggctgcttgtcatagctgacacagagccatctgccacaaacctgtggcggcttcagatctccaatccctgccaccaccccaactcaaattaaatacagattcctagagacgttatgatggttacacatgtcctcggcatcacatgtaggagactgttcaaaaaaaatatgtggcctgttgtataaccgcactcatgtatcccatatgtggtgccacattgaatttccggttgaatccgtttttatcctttgtactggatgacatggtgcctgaattctttcttttcgccgacacgatggcagccaaactgcagcttcaaacgctcacacttggctgggtttctacctaggttgccaggttatcatcggagccttcttgtgtcctcaaagggccacgaggcctgaaaggaggatcagaatgctttgggattaattgggcagccatcgcagaattgtttgtgggcaaagggctgctttagcacttttcttttagcaaattaatgactctcaggcacagggggttttaagtgaaggtattaataagaggtctggcaggtattcccatgattcacagagttacatttgcatttaattaatcttaaagttgcaagataaacagctgtaattcggacaaacatgacaaacacagtgaagccaactatcccataaaatgaacactgacatacttgttttaatttttttcccagcgtaaaaatagaaaaatcaaaatactcctaacaaaaccagtgattttgatagaaatatttctccaatatacttgcatccacctacaaatataaccttttcaagataaatcgcttatgatttcaatagtcaaactgctgtgtttgttgatgtaaagatgttttgaatggctagatggtaaaataaattcttaataaagtacccactgcaattttt

SEQ ID NO: 2303 - protein, 272 aa, Homo sapien
MLGLKGNGGAVLSMALPFQPEQRDSEDLLKNFNSECDTHCGLDTARQEYLGNSLRQESDLKKSTSSDNSSSHHGENKQNLTVDPCDILGGVDNQQRLLHIVWPHRWEHDKDPESFFKVLMHLKDLGLNFHVSVLGETFTDVPDIFSEAKKALGSSVLHWGYLPSKDDYFQVLCMADVVISTAKHEFFGVAMLEAVYCGCYPLCPKDLVYPEIFPAEYLYSTPEQLSKRLQNFCKRPDIIRKHLYKGEIAPFSWAALHGKFRSLLTTEPREDL

SEQ ID NO: 2304 - DNA, 2204 bp, Homo sapien
gaaaacattttgctgaaaatataagcaaacatcggccttgtcctccttgtgttcatacactgtggaagcttttctctgcctcctccgtgagagtgcgtggccgggagaccagaaacgtggtcctttctcttgcctgtgagctggtgcagagatggaggaagaagaatatgaacaaattccccaggagaatcccccagaagagctgtcccaggatcctgtgctggagctgtcaggaggtctcgccagaggtggcagacgctatctgccaagccatcgtcttatccgccccagggccccacgccgtgctcctggtgacacaactgggccggttcacggatgaggatcagcaggtggtcaggcgcctgcaggaggtctttggagtgggggttctgggtcacaccatcctggtgttcacccggaaggaagacctggctggcagctccctggaagactatgtgcgagagaccaacaaccaggcccttgcctggctggatgtgacccttgcacggcgccattgcggcttcaacaacagggcacagggggaggagcaggaggcccaactgcgagagctcatggagaaagttgaagccattatgtgggaaaacgaaggagattattacagcaacaaggcttaccaatatacccagcaaaactttcggctgaaagaactacaggaaaggcaagtaagccagggccaaggctctgaggacgtgcctggtgaggagtcttggctggaaggactgtcccagatccagaaggaatctgaggaagcccacagatgcctgctggggaaggctgacctttgagcctgtgctggacttgagccaaggacaccatcagcctttgcacccccctgtgtccagccctctgtttctctttccatcccatggagtgcttcccagtctccaggtcatgacgtctggtgtaggaagaggggcatggggcttgaggacagggtccagcatgcccagatcacattccagttccttcattccttcttccagaacatctgggtcctccctcctctgtgccccaacagcacgctgtcttcctattggaccttctatctcattggcattgcctttcatgagttacttgtctatactctgatagaaccaaagtttcttgagggcaggcctgtatcttttacttctgtgtaacttccacagcttttgactgcattggagtcatgcagtcacgtttggtgcggcaactccatgcaagctgttgaccagatgacttctcatctctccccacaccatgatggtttaaggtgcctgttgtgtctggtggagacagtgctgggagatgatcagaaatctcagggcacagcctcaggtctacctggacactcatccactgttggagatgctcaacagctagacacagatgctcacagccgacctgtggcctcttgctctgaagccatcccccatcttccctagacacagcagacatctgagaaagcttcagcatttctcttgctaacagattcagaaaagtgtctcaaagcagagcacagagttatttggtgtttgctgaagacagcctttgtgccacaatcacttattaaataagcgatcaatttcccattgaactgaacatgcaacatttatcatacattcagctctcattcacactccttaagatttggtcagaatttttatttctgttcatgtcttctacttttctactcctgtatgaataaaatattgatttgattacagtggctttgactataatgtgggagccaatttttgcctcagtcttcatttttatatttaccttgttattctcaggcatttttttcttctatgtgagagttaaaatcattctgtaatttccccccaaaatcatattggtattctagttggcaatgtcttacatttatgttaagtttgagggaattggtagttcaagtataagttaattaaggccattttatttctaagtgaacagacttgaaactccagagctactgaagtaaaagttagaatcatttgcattttcattcagataggagataattttgtaaattttgatgctattattttaactctattagcttaagtaatgtcataatagaaaacacaagcatttgaccaaatgagatccattcagcgactaactggcaaggcactcaaaacatgtcattcattaaatgttgtttttatttacctcaaaaaaaaaaaaaaaaaaaaaaa

SEQ ID NO: 2305 - protein, 212 aa, Homo sapien [sequence omitted]

SEQ ID NO: 2306 - DNA, 1337 bp, Homo sapien
aataggggaaaataagccagatggataaaggaagtgctggtcaccctggaggtgcactggtttggggaaggctcctggcccccacagccctcttcggagcctgagcccggctctcctcactcacctcaacccccaggcggcccctccacagggcccctctcctgcctggacggctctgctggtctccccgtcccctggagaagaacaaggccatgggtcggcccctgctgctgcccctactgcccctgctgctgccgccagcatttctgcagcctagtggctccacaggatctggtccaagctacctttatggggtcactcaaccaaaacacctctcagcctccatgggtggctctgtggaaatccccttctccttctattacccctgggagttagccacagctcccgacgtgagaatatcctggagacggggccacttccacgggcagtccttctacagcacaaggccgccttccattcacaaggattatgtgaaccggctctttctgaactggacagagggtcagaagagcggcttcctcaggatctccaacctgcagaagcaggaccagtctgtgtatttctgccgagttgagctggacacacggagctcagggaggcagcagtggcagtccatcgaggggaccaaactctccatcacccaggctgtcacgaccaccacccagaggcccagcagcatgactaccacctggaggctcagtagcacaaccaccacaaccggcctcagggtcacacagggcaaacgacgctcagactcttggcacataagtctggagactgctgtgggggtggcagtggctgtcactgtgctcggaatcatgattttgggactgatctgcctcctcaggtggaggagaaggaaaggtcagcagcggactaaagccacaaccccagccagggaacccttccaaaacacagaggagccatatgagaatatcaggaatgaaggacaaaatacagatcccaagctaaatcccaaggatgacggcatcgtctatgcttcccttgccctctccagctccacctcacccaaagcacctcccagccaccgtcccctcaagagcccccagaacgagaccctgtactctgtcttaaaggcctaaccaatggacagccctctcaaaactgaatggtgaggccaggtacagtggcgcacacctgtaatcccagctactctgaagcctgaggcaaaatcaagtgagcccaggagttcagggccagctttggataatgggagcgaggatgccatctctagttaaaaatatatattaacaataaagtaacaaatttaaaaaaaaaaaaaaaaaaaaaaaaaa

SEQ ID NO: 2307 - protein, 303 aa, Homo sapien
MGRPLLLPLLPLLLPPAFLQPSGSTGSGPSYLYGVTQPKHLSASMGGSVEIPFSFYYPWELATAPDVRISWRRGHFHGQSFYSTRPPSIHKDYVNRLFLNWTEGQKSGFLRISNLQKQDQSVYFCRVELDTRSSGRQQWQSIEGTKLSITQAVTTTTQRPSSMTTTWRLSSTTTTTGLRVTQGKRRSDSWHISLETAVGVAVAVTVLGIMILGLICLLRWRRRKGQQRTKATTPAREPFQNTEEPYENIRNEGQNTDPKLNPKDDGIVYASLALSSSTSPKAPPSHRPLKSPQNETLYSVLKA

SEQ ID NO: 2308 - DNA, 999 bp, Homo sapien
gggcgaggctgcaccagcgcctggcaccatgaggacgcctgggcctctgcccgtgctgctgctgctcctggcgggagcccccgccgcgcggcccactcccccgacctgctactcccgcatgcgggccctgagccaggagatcacccgcgacttcaacctcctgcaggtctcggagccctcggagccatgtgtgagatacctgcccaggctgtacctggacatacacaattactgtgtgctggacaagctgcgggactttgtggcctcgcccccgtgttggaaagtggcccaggtagattccttgaaggacaaagcacggaagctgtacaccatcatgaactcgttctgcaggagagatttggtattcctgttggatgactgcaatgccttggaatacccaatcccagtgactacggtcctgccagatcgtcagcgctaagggaactgagaccagagaaagaacccaagagaactaaagttatgtcagctacccagacttaatgggccagagccatgaccctcacaggtcttgtgttagttgtatctgaaactgttatgtatctctctaccttctggaaaacagggctggtattcctacccaggaacctcctttgagcatagagttagcaaccatgcttctcattcccttgactcatgtcttgccaggatggttagatacacagcatgttgatttggtcactaaaaagaagaaaaggactaacaagcttcacttttatgaacaactattttgagaacatgcacaatagtatgtttttattactggtttaatggagtaatggtacttttattctttcttgatagaaacctgcttacatttaaccaagcttctattatgcctttttctaacacagactttcttcactgtctttcatttaaaaagaaattaatgctcttaagatatatattttacgtagtgctgacaggacccactctttcattgaaaggtgatgaaaatcaaataaagaatctcttcacatg

SEQ ID NO: 2309 - protein, 136 aa, Homo sapien
MRTPGPLPVLLLLLAGAPAARPTPPTCYSRMRALSQEITRDFNLLQVSEPSEPCVRYLPRLYLDIHNYCVLDKLRDFVASPPCWKVAQVDSLKDKARKLYTIMNSFCRRDLVFLLDDCNALEYPIPVTTVLPDRQR

SEQ ID NO: 2310 - DNA, 2217 bp, Homo sapien
ttttcagtgcctcttctgtcacaatcgtagacacggtcacactccagtatctgggaaaacacagagatcgctatgggttgcagcgcatgtggggctccctgggctggggcctggcgatgctgtctgtgggcatcgggatcgactacacccacatcgaagtgctcatcgatggaaaggggtgtaagccccccgagtacaggaattaccagatcgtcttcatcgtcttcggcgttctcatgaccatggccttgatcgttgccactcagttccggttccgctacaaccatttcaaaaacgatgattctaaagggaaagaggtggagatcccgcaggtggaaaggaacaactctacagagtcctctgaggagacaccaaccaccacaagccactcgcaggccttcaacttttgggacttaatcaagctgctctgcagcgtgcagtatggctcagtgctgtttgtggcttggttcatgggttttggatatggcttcgtgttcacctttctctactggcatttggaagacctcaatggaactacaaccctctttggggtctgttcagtcctgagtcatgtgtctgagctgacagcatatttttttagtcacaagcttattgaattgatcggccacatcagggttctgtacattggcctggcctgcaatacggctcgctatatttatatttcctacctggagaatgcctggactgttctccccatggaagttcttcaaggagtgacacacgcggccatctgggcagcatgcatttcttacctcagtgcagccgttccccctgagctgaggacatctgctcagggcatcctgcagggccttcacctgggtttgggaagaggatgtggtgccatgatcggaggcgtgttagtcaattattttggggctgctgcaaccttccgaggaattggcatggcctgcttggtgatcctactgctctttgccctgatccagtggctggcagtgccagatgaggaagaagacaagacaatgttggcagaaagaattcctgttccctccagtcccgttcctatagcaaccatcgacttggtacagcaacagacagaagatgtcatgccacgcattgagcccagacttccacccaagaaaactaagcaccaggaagaacaggaagatgtgaacaaaccagcctggggagtcagctcttctccctgggtgacctttgtctatgcactctaccaaattaaagagatgatgcaactcacaagagacaaccgtgcttctgagatacagcctttacaggggaccaatgggaatagggaaaattctcctgctggtagagcccagcctgtcccatgtgagactcactctgacccatctagaaaccagccatcccctgacgcagcagcatctcagacgcagaccagccccgctcaccccagtgtggacccgtgcacagaggagagtgaagagcagcaggctcagctggccgcgggaggacactgagggcatcctgctcatctcacaccctgcatggaatcaggctcctcagccaggacacagggtgaggccccccagccaggatatgcctcccctggaggagcacagcactgcatatgcttctaaatatctaaactcattaacatggaaacacacacacaggagctacagtacatattggcagaaaaaggtaaactttcgtaatctcattggaattacaacagggaaatggagttcaatgaggactttcagttctttgcttggttaggttaaggatgatagaatttctctgccagtgcagtaagagttgaaaccggcagttacactaagtaagtggagggaatgaaagtgtttcgaggtgaatgtggatataatttccctcttctgattatttattcttatttggttcctaacacaaactgggaagagatagaattcatctatactttcttttttcttggagagaaccgtttaaaaaattacaagatatatttaaaaagtaaccagataaaagtagcacatgtgcttttgttaaaaataaagttaaaagttaaagttaaaaaatgaagttaaaagtttcatcagaaactttacatatctttagcaaatatatttttatatgtgtatggcatataatggaaataattctttgagcaacagaagctattattaactactgcaagctaagccgagcttaaaaatgccttttgttttaaatgggctttgagaaaaaaaaaaaaaaaaa

SEQ ID NO: 2311 - protein, 463 aa, Homo sapien
MWGSLGWGLAMLSVGIGIDYTHIEVLIDGKGCKPPEYRNYQIVFIVFGVLMTMALIVATQFRFRYNHFKNDDSKGKEVEIPQVERNNSTESSEETPTTTSHSQAFNFWDLIKLLCSVQYGSVLFVAWFMGFGYGFVFTFLYWHLEDLNGTTTLFGVCSVLSHVSELTAYFFSHKLIELIGHIRVLYIGLACNTARYIYISYLENAWTVLPMEVLQGVTHAAIWAACISYLSAAVPPELRTSAQGILQGLHLGLGRGCGAMIGGVLVNYFGAAATFRGIGMACLVILLLFALIQWLAVPDEEEDKTMLAERIPVPSSPVPIATIDLVQQQTEDVMPRIEPRLPPKKTKHQEEQEDVNKPAWGVSSSPWVTFVYALYQIKEMMQLTRDNRASEIQPLQGTNGNRENSPAGRAQPVPCETHSDPSRNQPSPDAAASQTQTSPAHPSVDPCTEESEEQQAQLAAGGH

SEQ ID NO: 2312 - DNA, 2349 bp, Homo sapien
ggaattagcctcctcaatgaaaaagaaagagggggaggaagaggaagagaaaagaagaagaaaaccctgaacatggtttcattggatattcacccgaactgctacagaacaacacgctgcccgattacagcccgggggaatcttttttcactgtctttggggttttcttcccagcggctacaggagtcatggccggttcaacatggggggcgacctcagggagcctgccgccagcattcccctgggctccctggcagctgttggcatctcgtggtttctgtacatcgtcttcgtcttcctcctgggcgccatctgcactcgagaggcccttcgctatgacttcctgatagcggaaaaggtatccctcatgggcttcctgttccttttgggcttatacatctcgtccctggcttcctgcatgggaggactttatggagctccccgcatcctgcagtgcattgcccaggagaaagtgatccctgcacttgcctgtctgggacaagggaaggggccaaacaaaacacccgtggctgccatctgcctgaccagcttggtgaccatggcctttgtttttgtgggtcaagtgaacgttctggcccccatcgtcaccatcaacttcatgcttgacatacgttgcagtggactactcttacttctccctgtccatgtgttcctgcagcctgaccccggtgcctgagccggtgctcagggagggcgcagaaggcctccactgctctgagcacctgctcttagagaaagctcccagttacggctctgagggacctgcccaaagagtcttggagggcacgctactggaattcaccaaggacatggatcagctcctccagctaaccaggaagcttgagagtagccagcccaggcaaggagatggtaacaggaccccagaaagtcagaagaggaaaagcaagaaggccaccaagcagaccctacaagatagcttcctcttggacctcaaatcccctccttctttccctgtcgagatctctgacaggttgcccgctgcctcctgggaggggcaggagtcctgctggaacaagcagacttccaagagcgaagggactcagcctgagggaacatatggagagcaacttgttcctgagctgtgcaaccaatcagagtccagtggagaagatttcttcctgaagtccaggctccaagaacaagatgtctggagaagatccacttctttctatacccacatgtgcaacccctgggtctccctgttgggggctgttgggtcccttctcatcatgtttgtgatacagtgggtgtataccctggttaacatgggtgttgctgccatcgtgtatttctacattggccgggccagtccagggcttcaccttggatcagcctccaacttcagctttttccggtggatgaggtctctcttgctcccctcctgcaggagcttgcagtccccccaggagcagatcatcttggcgccgtccctggctaaggttgacatggagatgactcagctcacccaggagaatgcagacttcgccactcgggatcgctaccaccactcctccctcgtgaaccgggagcagctgatgcctcactactagatgcagtgctgggaccttcctcttttggagctgtcccatgtacagtggacccaagcccaggaccttcgtggagctgcttctccaacctgagaaactcaagacccatcctcccgctgtcactttggacaatggaaatctacattttcttttccctttttttttttttgagacagagtctcgccttgtcacccaggctggagtccagtggcacaatcttggctcactgcaacctctgcttcccgagttcaagcaattctcctgcctcagctctgagtagctgggattataggcatgcaccaccaccacccagctattttttgtatttttactggagacagggtttcaccatgttggccaggctggtctcgaactcctgacctcgtgatccacccgtctcagcctcccaaagtactgggattacaggcgtgagccaccatgcctggccagaaatctatgttttcttagaacatgtggaagaaggaaaaagacaaaaaggaagtctggattctgaggaccacgtctcacccagggtgacatcaggaatggtgctagcctctgcaacacgacacccagtttgaagagctctatacaggtactaagactagcaggggacaccaagactctgcacaaccagattgcttgtgcagagggccacaataagtgtatgttttatattttattgtattatttattcaaaaataaataatacactcacatgtttccacacccaaaaaaaaaaaaaaaaaaaaaaaaaaaa

SEQ ID NO: 2313 - protein, 308 aa, Homo sapien
MCSCSLTPVPEPVLREGAEGLHCSEHLLLEKAPSYGSEGPAQRVLEGTLLEFTKDMDQLLQLTRKLESSQPRQGDGNRTPESQKRKSKKATKQTLQDSFLLDLKSPPSFPVEISDRLPAASWEGQESCWNKQTSKSEGTQPEGTYGEQLVPELCNQSESSGEDFFLKSRLQEQDVWRRSTSFYTHMCNPWVSLLGAVGSLLIMFVIQWVYTLVNMGVAAIVYFYIGRASPGLHLGSASNFSFFRWMRSLLLPSCRSLQSPQEQIILAPSLAKVDMEMTQLTQENADFATRDRYHHSSLVNREQLMPHY

SEQ ID NO: 2314 - DNA, 1079 bp, Homo sapien
ctgacgacttgaagccagaggcaccgccagttggccccagcccgcagcatggcagccgccgcctatgtggaccacttcgccgccgagtgcctcgtgtccatgtcgagccgcgcggtcgtgcacgggccgcgggaggggccggagtcccggcccgagggcgcgtccgtggccgccacccccacgctgccccgcgtcgaggagcgccgcgacggtaaggacagcgcctcgctcttcgtggtagcgcggatcctagcggacctcaaccagcaagcgccggcgcccgccccggcggagcgcagggagggcgccgcggcccggaaggcgaggaccccctgccgcctgccgccgcccgcccccatgagcccacctcccccggcgctgaaggcgcggcgagccgcgccccccagcccggcgtggagcgagccggagcccgaggcggggctggagcccgagcgggagccggggcccgcggggagcggcgagcccggcctcagacaaagggtccggcggggccgaagtcgcgccgacctcgagtccccgcagaggaagcacaagtgccactacgcgggctgcgagaaagtttacgggaaatcttcgcacctcaaggcgcacctgagaactcacacaggtgagaggcccttcgcctgcagctggcaggactgcaacaagaagttcgcgcgctccgacgagctggcgcggcactaccgcacacacacgggcgagaagaagttcagctgccccatctgcgagaagcgcttcatgcgcagcgaccacctgaccaagcacgcgcgccgccacgccaacttccacccgggaatgctgcagcggcgcggcgggggctcgcggaccggctccctcagcgactacagccgctccgacgccagcagccccaccatcagcccggccagctcgccctgagcccgcacagccatgagcagccgctcccaccccctcgtgagtccctggcctttccttttgttataagaaagaagagagagaacttgatgccaagtccacgaaaaaacaatttttttcacctcaggtgtcaaagtaaatttgttaaaaaaaaaaaaaaaaaa

SEQ ID NO: 2315 - protein, 289 aa, Homo sapien
MAAAAYVDHFAAECLVSMSSRAVVHGPREGPESRPEGASVAATPTLPRVEERRDGKDSASLFVVARILADLNQQAPAPAPAERREGAAARKARTPCRLPPPAPMSPPPPALKARRAAPPSPAWSEPEPEAGLEPEREPGPAGSGEPGLRQRVRRGRSRADLESPQRKHKCHYAGCEKVYGKSSHLKAHLRTHTGERPFACSWQDCNKKFARSDELARHYRTHTGEKKFSCPICEKRFMRSDHLTKHARRHANFHPGMLQRRGGGSRTGSLSDYSRSDASSPTISPASSP

SEQ ID NO: 2316 - DNA, 2558 bp, Homo sapien
  Unsure 360: Unknown base
gaattccggctcccgcggctgcaggcgcgcgcctagagtgcctggcgggctccggcttccgcgtccgccccggccccggtccagacttagtcttcagctccgcgcccgctccgccgcggcccaccgcgcccgccggcagccgagcccccagcgacgcccgcacagctccgggtgcccagacagggggccatgccgtgccggagggaggaggaagaggaagccggcgaggaggcggagggggaggaagaggaggaggacagcttcctcctactgcagcagtcagtggcgctgggcagctcgggcgaggtggaccggctggtggcccagatcggcgagacgctgcagctggacgcggcgcangacagcccggcctcgccgtgcgggcccccgggggcgccgctgcgggccccggggcccctggctgcggcggtgccggcggacaaggccaggtccccggcggtgccgctgctgctgccgcccgcgttggcggagactgtgggcccggcgccccctggggtcctgcgctgcgccctgggggaccgcggccgcgtgcggggccgcgctgcgccctactgcgtggccgagctcgccacaggccccagcgcgctgtccccactgccccctcaggccgaccttgatgggcctccgggagctggcaagcagggcatcccgcagccgctgtcgggtccgtgccggcgaggatggctccggggcgccgccgcctcccgccgcctgcagcagcgacgcgggtcccaaccagaaacccgcacaggcgacgacgacccgcaccggcttctgcagcagctagtgctctctggaaacctcatcaaggaggccgtgcgaaggcttcattcgcgacggctgcagttacgtgcaaagcttccccaacgcccgctcctgggacctctgtcggccccggtgcatgaacccccttcgcctcgcagccctcgcgcggcctgcagtgaccctggcgcctccgggagggcgcagctcagaactggcgacggcgttcttgtgcctggcagctaacacgcccggggtggccacagcgccagcctcagactggagggcaaggggttcccttgagggctgcagttctactcaggctggtggagaactctggcttttggaagcgagagtaaaaagctaatgacgaggaaccgaaaaatcgcgagtgtttcgcgggtaactggggttgagggccaaaatatttggaatgaaggacttggccctatttaaggcagattttacagagcgcacctcaaacgtacaagtcagtaggactccttatttggcgtgacccgacctggccgcggagcctgcatttcctcgcagcctctcagtgccctccagccccgcgaccatgtggccacaatccacgcttctccggatcgcggtgcgccggaaccacggaggatgatgccagttacttgctttaccttttcagggctggctcctgatccactttgggggaggagaacatgagtagataatttcagggtgcagcccaatctgccagacttaaaaaaaccatcttgtgtctttggaggtgctgcttaatatcaaacatgcggtgccatgaagggaccctttgggggttgaataggagttaacccctgcgctctctttgcaactgtctctcttctcagagtggtgggggaaggctgtacgacacgggtggggaaaggaggtgggggcggggagtattgaatggtggtggaagggtagagaggcgcggagtgaaccccacgccctgtctaaagtgtattttcagagccggcccgcctctcctcggttcaaggtcactgtttcctgggcacgcactgggttgcgggacagagtagccagtttctgccggtgctcggagaagagcgcagtgttttgcaagtgctggagtctcctgaggacacgcgcgtcgccgccaccgcgggtgtgggaaagcgcggacgtgctgggcgtctgtgcttcggtaggcgaccaccgcccctggccgcgctccgggctttcacggaaactcccgagaccgggccctgggttcctcctctcctactcggctctgcagtcctactcaagcgggtggctctgggatcctgggggcctgggttgggggctagggagacgccatgtgatggacactccagggacacacagcctagcacagcagcttataatgggctctccggggccatttgcaataacagctgcaattccctggatagacgagttgatttcctccctctgcccctcccccagccatgccagctggcctttgtaagtgcaggaaaccgagtagaaaatgtgaccctccaaatggagaagctgccagctttgccattgtgaaccatggtgaagtgcttggaacatactgttcactcactctaaaggcgctgagactgtgctgttgttctcgtttttatagtcaatggcttgttcatcatccagatgtggctactgacatatctacacttcgcaccggagtgtctggaattgtggctatcctgattataggattttaacttaactgaaatgcctgctttgaataaatgtgttgggttttt

SEQ ID NO: 2317 - protein, 279 aa, Homo sapien
  unsure 57: unknown amino acid
MPCRREEEEEAGEEAEGEEEEEDSFLLLQQSVALGSSGEVDRLVAQIGETLQLDAAXDSPASPCGPPGAPLRAPGPLAAAVPADKARSPAVPLLLPPALAETVGPAPPGVLRCALGDRGRVRGRAAPYCVAELATGPSALSPLPPQADLDGPPGAGKQGIPQPLSGPCRRGWLRGAAASRRLQQRRGSQPETRTGDDDPHRLLQQLVLSGNLIKEAVRRLHSRRLQLRAKLPQRPLLGPLSAPVHEPPSPRSPRAACSDPGASGRAQLRTGDGVLVPGS

SEQ ID NO: 2318 - DNA, 3510 bp, Homo sapien
caggaagaggtatttcttggggatgctaccaaggcagagactgtgaagaaggaagaacgttgcttgggcaaaaggagcatattctcaggagacggggcccctgcctgccacaccaagcattaggccaccaggaagacccccatctgcaagcaagcctagccttccagggagaaagaggcccctgcagctccttcatcatgaactggcacatgatcatctctgggcttattgtggtagtgcttaaagttgttggaatgaccttatttctactttatttcccacagatttttaacaaaagtaacgatggtttcaccaccaccaggagctatggaacagtctcacagatttttgggagcagttccccaagtcccaacggcttcattaccacaaggagctatggaacagtctgccccaaagactgggaattttatcaagcaagatgttttttcttatccacttctgaatcatcttggaatgaaagcagggacttttgcaaaggaaaaggatccacattggcaattgtcaacacgccagagaaactgaagtttcttcaggacataactgatgctgagaagtattttattggcttaatttaccatcgtgaagagaaaaggtggcgttggatcaacaactctgtgttcaatggcaatgttaccaatcagaatcagaatttcaactgtgcgaccattggcctaacaaagacatttgatgctgcatcatgtgacatcagctaccgcaggatctgtgagaagaatgccaaatgatcacagttccctgtgacaagaactatacttgcaactctttttgaatccatacaggtcgtctggccaatgattcttttacttacctatctgtctaccagtagcggtccttgcccatttgggaaactgagcttctttcttctgcactgggggactggatgctagccatctccaggagacaggatcagttttacggaaacaactcagttagtatagagatgaggtccgcttctgtagtactgagcatttctgactgatcaaaaaggcctagtctgttgacagggtttgttttattttagcctcagagtataccatactactagggagtaactgtagagtgagaaattataaacattatttagggattaccatggtggaagagggataaacataggtcctgtgacttcgtctctgttctcaagggaaccccattcacatgcccctcctaactccacaagcgagggtagcagaggctctcctcagtctgaactaaggcttggccttggggagggctcctagtgctgagcttggagcagcacggacagcagcattgtttatgggaatggagagaggtctgggcaggataggaaccttcttggagacccctttgaagaaaaccaggcagccaagggagccaaacacactagatttctgttcttcagcaaagccctgaagagacacttaagctaaaaattcccttgtcatatttctgaaactccattataacatatgtaactcctttgtaaccaaaatttaggtaagcaggcttcctttgctctgaaggttttgagtacctggctgtatttgttgagtatttttaaaattttggatagtctcttaggcaacaataatcacaatatattcatcccttcagttctggagaaagcctgataccagcacagcctactgaccccaaggagcctggcactgattggcatcacattgatctaagaactggtccagccgacgaagagtaggaaaagagaagggctgctcagggaaacattggctgggggcacggaataagcacatagtaaaaagggaacatcagggtcaaatggaaatcacctgagacaggaaacagggagttcatttggccacactggaagaaaggcaagaaagaggaagacaagtcttggggtaccctggctgttctccacactcacaagacatcagctatatactctgcttggtgcataagagagagaaaagagatgccttttgtgttttgagtaagaataattaaaccataaggaagaccatgtataaaactgatggaaataatagtcaccaaagtacagcacataccattttgtgtctaataacaatgtagcacagtaatgactgtacatgtcattgtatgtataccaaacaagattgttgtaaatcatattttttattacaacactaagttctgcttctgcattcctaggtttcatcatttttggctccttagcatggccacttacaattttttaacatgagataacacatcaggtgtcagaacttgcttgaagggaattaccagaagtaatttgtgtttgagatggggtggaaattggaattatattagtagccggtggagatacaagttctctgactgtgttgggaaaggataagtgctaccgttgagaagggaagaaaggctgagtctaggtggagaaaaatatcaacagaactctagccaaaggcaagccccagaactcagacaacagaaaggaaatcctaatccttctgttttgagaagagagaactgtagttgcttcacttcctatttcatgacagaataactgcaaacttttaagatcaggaaatgtagacatctagtgatttctttagtagacagtttaatttcccccaagattaggagacacttctgtgcaggttctaaaaggagcccaatggcctggggtgggagtggggagtagatagggaatatgtgggatttggtttaagttcatcattgggagagttcctggatccttgcaagcttagataaatgtgatctttattagatagcagtggcatgcttttaaaaaaaaaaaggcaatgaaaatttagcaagccactgaatttgagttttcactttgtttctaatatgctgtgtgaatcagtacagttttcttaccctttcttggtcttaatttccttactgataaaatggggtagtaatacctatctcaaaaaatattgcacatattaaataacattcctctatgtatctcaatggcattagacattaggagaagcattttgtggaggatttgaagttgagatcttcatccaagaagtagcttttcaatttgctagaagcttaatgtaggcaagccacttcatttttcagaacttgtttactcatttataatatgggaataaaaatttgtgcaagtcagagaagggtgccttaaaaatgttgtggccaagccacatgagatcaaagacacacttttcatgacctcaaatgtgggcccagcctaggtcagccaacccccatccaacccttagactcacgaacaaatccacctgagatcagcagagccaccctagatcagctgaaactctaagcacaaaaataaaaacttatcactgtataccactggagttttctggttatctctcgtatagcaaaatctaactgatgcaatctccatctggccttcatccttctccctttattgtcctttcgtgtattgttcatccagcaaccaggatgatcttgttaaaacattaaacagattctgtcactctt

SEQ ID NO: 2319 - protein, 188 aa, Homo sapien
MNWHMIISGLIVVVLKVVGMTLFLLYFPQIFNKSNDGFTTTRSYGTVSQIFGSSSPSPNGFITTRSYGTVCPKDWEFYQARCFFLSTSESSWNESRDFCKGKGSTLAIVNTPEKLKFLQDITDAEKYFIGLIYHREEKRWRWINNSVFNGNVTNQNQNFNCATIGLTKTFDAASCDISYRRICEKNAK

SEQ ID NO: 2320 - DNA, 1444 bp, Homo sapien
ggggggggcggggcgcccagcgggatgcggtgaagggcgagcggcgcggcggctgcgatgagtgcctctgcggccaccggggtcttcgtgctgtccctctcggccatcccggtcacctatgtcttcaaccacctggcggcccagcatgattcctggactattgtaggggttgctgccctcatcctgttcctggtagcactgctggctcgtgtcctcgtcaaaagaaaaccaccccgggacccactgttctatgtgtatgcagtttttggatttaccagcgtggtgaacctcatcataggactggagcaagatggaatcattgacgggttcatgacacactacttgagagagggtgaaccgtatctgaacaccgcatatgggcacatgatctgctactgggatggctctgctcattatctgatgtacctggtgatggtggcagccatagcatgggaggaaacttatagaaccattggcctatattgggttggatctattattatgagtgttgttgtttttgtgccaggaaacattgtagggaagtatggaacacgaatttgccctgcttttttcttaagcataccatatacttgtcttcctgtctgggctggtttcagaatctataatcagccatcagaaaattataattacccctcaaaggttattcaagaagcccaagcgaaagacctgctgagaagaccatttgatttaatgttggttgtgtgtctcctcctggcaactggattttgcctgttcagaggtttgattgctttggattgcccatctgagctctgccgattatatacgcaatttcaagagccctatctaaaggatcctgctgcttatcctaaaattcagatgctggcatatatgttctattctgttccttactttgtgactgcactgtatggcttagtggttcctggatgttcctggatgcctgacatcacattgatacatgctggaggtctggctcaggctcagttttctcacattggtgcatctcttcatgctagaactgcttatgtctacagagtccctgaagaagcaaaaatcctttttttagcattaaacatagtatatggagttcttcctcagctcttggcctatcgttgtatctacaaaccagagttcttcataaaaacaaaggcagaagaaaaagtggaataaaaatattacttcatgttcctcctttctaaattactaacttttgttatactggtactgatattttgtcccatttcactctcttctcatacgtgagtacttaagaatatgtacattcttgctctgcactgtatgtgtgagctatatggtattgtgtaaattttttttgaaggaaaatggaaattcttgagaaacagtttgtttaaagaaatatattcaaaatcatttgtgaataaacttgatcatccatctcaaaaaaaaaaaaaaaaaaaaaaaa

SEQ ID NO: 2321 - protein, 370 aa, Homo sapien
MSASAATGVFVLSLSAIPVTYVFNHLAAQHDSWTIVGVAALILFLVALLARVLVKRKPPRDPLFYVYAVFGFTSVVNLIIGLEQDGIIDGFMTHYLREGEPYLNTAYGHMICYWDGSAHYLMYLVMVAAIAWEETYRTIGLYWVGSIIMSVVVFVPGNIVGKYGTRICPAFFLSIPYTCLPVWAGFRIYNQPSENYNYPSKVIQEAQAKDLLRRPFDLMLVVCLLLATGFCLFRGLIALDCPSELCRLYTQFQEPYLKDPAAYPKIQMLAYMFYSVPYFVTALYGLVVPGCSWMPDITLIHAGGLAQAQFSHIGASLHARTAYVYRVPEEAKILFLALNIVYGVLPQLLAYRCIYKPEFFIKTKAEEKVE

SEQ ID NO: 2322 - DNA, 2879 bp, Homo sapien
catttgctatgaatattctctataacaaagcaagacaaatttagcagcacttcattgcatctggatgggggagagagctggacaatttcttgctaacaagagatggttaactgccctcacctcagccgtgaattctgcacacctcgcatccggggcaacacctgcttctgctgtgacctctacaactgtggcaaccgggtggagatcactggtgggtactacgaatacatcgatgtcagcagttgccaagatatcatccacctctaccacctgctctggtctgccaccatcctcaacattgttggcctgttcctgggcatcatcactgccgctgtccttggaggctttaaggacatgaacccaactctcccagcactgaactgttctgttgaaaatacccatccaacagtttcttactatgctcatccccaagtggcatcctacaatacctactaccatagccctcctcacctgccaccatattctgcttatgactttcagcattccggtgtctttccatcctcccctccctctggactttctgatgagccccagtctgcctctccctcacccagctacatgtggtcctcaagtgcaccgccccgttactctccaccctactatccaccttttgaaaagccaccaccttacagtccctaaagaggaatgcctgctggctattgagattattgtggcttttgtatttctgcttcagtggaagtgtgtagggtacaaaatttaaagtgtgactcttatgcataaagttttacaatggcctgccaggctagggaaagatagggacgaagcttattcattattagtgcagagcaggggtggtcaggctgaacgcagcacagaagggcagctcacattctctaagcaagactggggagccagcccagcaagaagcttgtttggacttgcattaccctatgctccacctctgtattcagcagaagtgtggttgccatctttttcactttatgtaaaggagtgttgccctcgggcccttggcagattgccaccccagcacctaggttgaagcacctggtttataggccctatctttccctacccctaaagtcagtccctaaggacaatttcccagctgatggggctacacagtagttccaatacagagagttctggctaagattttgtttgcttgtgtctggatgttgaaaaagactgcccgtatctcttactccttccttctctgtgagtattgtaaaaatggctgttgtgatcactcagctcagcttttgttattggtacctcctaaagggaaaagtgcaatattcttgcatcttcagtagtggggaacaggatgtattgttccggaaacactgaaatacacagcaacatgtgagatgttttaagtagatcacttaggagacagtggttctactacatgttgcattattacaaaatacatttgctacaggagatataaatcttatggttgtaattcagagtttaaaaatgttataaattaggttcttgggtcgtgatatgaattgttactaatctttgtgactatttaatcttcaaatattgtgcttaaccccagcaatccgcacgtatcctgcaccccaccccaaaagagtcatctgtattttaatgccactggtcttatcggtccttttgtctgttgagaccagtcatgacagcattcaagattatgaaagtgttacaatgccgcttcaagtctgcaaaacctcaaacgtagccaacttgacaaatatttaagtgttacggcagatttaaaatccatctggcacaccgtggtaggtatttgtacagttcttttaattacacatagctttaaaccatcaacctgatgagtttaaagcttttgcacccatgccttcacttcagaatgaacaccttcattgtgatcttatgttaacctgagaattgatttaaaggaagattgataatcctatactttataacgtaaaaatacaggggctacaggagggtacctaattagacagttctccaaacacagaacacacactggaaaattttccggccaattttgctacctcccaacttgatggattagaggtagcgcatatgctggtgctcccatctaccttgtagacacttagccatcaagaatcaaggcacaagaagtgcactctctcattaacagtaaatgtttgcaagatattcagtttaactttcagcatcatgaatgttcttatccagattttgaatccgaaaaactataatccttttatgttatacaaaattactatgattttttacagttctgagcatattaaaattctactggatttcaaaaagagactaatacccaactgactaactaaacaaatatcaacttgtaatactcaatgaatttttttgccatttacatttgaccgttggctttagtgaatgtccatatttaattttttaaggcaccattacacagtttatcctacatttatcacatttcttaaagtgttaagattctatggctcatttctatgtatttttcttactttacaaaataacctgaaacagtatagattttgtaacacttaatttgagcagcttttttattacattgaattatataaagtgcatgttaccttagaaaaattagtatttgctgctttactcttttgcaaaacatttgctgtaatgaatggatttgtatttccaatatgtatcttgactgcattttgtaatatttactgctttattcctaattctgctttaaagtactgaactgggcatgaaacattaaaatattaatccagaaactgtataaactggatgttgcttaaaatctgtatcactgccatgttgaaaattcagactgcttttgtgatgtttcaaatgaataaaactatcctcccctcgtt

SEQ ID NO: 2323 - protein, 185 aa, Homo sapien
MVNCPHLSREFCTPRIRGNTCFCCDLYNCGNRVEITGGYYEYIDVSSCQDIIHLYHLLWSATILNIVGLFLGIITAAVLGGFKDMNPTLPALNCSVENTHPTVSYYAHPQVASYNTYYHSPPHLPPYSAYDFQHSGVFPSSPPSGLSDEPQSASPSPSYMWSSSAPPRYSPPYYPPFEKPPPYSP

SEQ ID NO: 2324 - DNA, 1152 bp, Homo sapien
aaggctattattaccaccactgagtggcttaaataatcctgtcaacagcaatcgcccatttccaaagccatggtgaaacatctctgtgctaatttcttttgttttgtttcctaattttttttttttggcaggtggtgggaaataatctttgtcttctttggagtaaaccttcaacaccggattttttcttttaattatggatgtaaaccccaatatccccataatttacattgggtctcgaccaattgcctaattataagaggatatatttaggctcttatttcatccacacaaaaacttgtgtaacaggtagttggaaacatctgaggcaccactttgattctgttttggatggtcatgttttttctcctccgtttccccagcatgtctgccaccatcctcatgcactgcttccaagtgcctgggagcctttatgagcgtccctaaacctaaaagaatccagaggcggggctcggatgaaccctcgagataagcaagtgagccgcttctcccctctaaaggatgtttacacgtgggtggcactcgctggaatccagcgctcgggcagccctgggaggacgcgctcagctgcgaggaggatggagagcaatacatcatcatctttggagaatttagcgacggcgcctgtgaaccagatccaagaaacaatttctgataattgtgtggtgattttctcaaaaacatcctgttcttactgtacaatggcaaaaaagcttttccatgacatgaatgttaactataaagtggtggaactggacctgcttgaatatggaaaccagttccaagatgctctttacaaaatgactggtgaaagaactgttccaagaatatttgtcaatggtacttttattggaggtgcaactgacactcataggcttcacaaagaaggaaaattgctcccactagttcatcagtgttatttaaaaaaaagtaagaggaaagaatttcagtgatgtttatactaataagtttgctagtacagtgtcagttatttaaagtggtaatgcccgataatgtcttttaaatgtttgaggatgttttaaatacatgcattgtcttcacgaagaagatgtaaaaataatgaacaataaattgcggtggaaacctaaaaaaaaaaaaaaaaaaaaaaaa

SEQ ID NO: 2325 - protein, 165 aa, Homo sapien
MNPRDKQVSRFSPLKDVYTWVALAGIQRSGSPGRTRSAARRMESNTSSSLENLATAPVNQIQETISDNCVVIFSKTSCSYCTMAKKLFHDMNVNYKVVELDLLEYGNQFQDALYKMTGERTVPRIFVNGTFIGGATDTHRLHKEGKLLPLVHQCYLKKSKRKEFQ

SEQ ID NO: 2326 - DNA, 1271 bp, Homo sapien
ttctcactatactggtcctgaggaaagggcttctgtgaactgcggtttttagtttttattgtggttcttagttctcatgagacccctcttgaggatatgtgcctatctggtgcctctgctctccactagttgagtgaaaggaaggaggtaatttaccaccatgtttggttcctgtttataagatgttttaagaaagatttgaaacagattttctgaagaaagcagaagctctcttcccattatgacttcggaaatcacttatgctgaagtgaggttcaaaaatgaattcaagtcctcaggcatcaacacagcctcttctgcagcttccaaggagaggactgcccctcacaaaagtaataccggattccccaagctgctttgtgcctcactgttgatatttttcctgctattggcaatctcattctttattgcttttgtcattttctttcaaaaatattctcagcttcttgaaaaaaagactacaaaagagctggttcatacaacattggagtgtgtgaaaaaaaatatgcccgtggaagagacagcctggagctgttgcccaaagaattggaagtcatttagttccaactgctactttatttctactgaatcagcatcttggcaagacagtgagaaggactgtgctagaatggaggctcacctgctggtgataaacactcaagaagagcaggatttcatcttccagaatctgcaagaagaatctgcttattttgtggggctctcagatccagaaggtcagcgacattggcaatgggttgatcagacaccatacaatgaaagttccacattctggcatccacgtgagcccagtgatcccaatgagcgctgcgttgtgctaaattttcgtaaatcacccaaaagatggggctggaatgatgttaattgtcttggtcctcaaaggtcagtttgtgagatgatgaagatccacttatgaactgaacattctccatgaacaggtggttggattggtatctgtcattgtagggatagataataagctcttcttattcatgtgtaagggaggtccatagaatttaggtggtctgtcaactattctacttatgagagaattggtctatacattgactgattcactttttcataaagtgagcatttattgagcattttttcatgtgccagagcctgtactggaggcccccattgtgcacacagggagagaacatgagtctctcttaatttttatctggttgctaaagaattatttaccattaaattatatggtgtggtgt

SEQ ID NO: 2327 - protein, 237 aa, Homo sapien
MTSEITYAEVRFKNEFKSSGINTASSAASKERTAPHKSNTGFPKLLCASLLIFFLLLAISFFIAFVIFFQKYSQLLEKKTTKELVHTTLECVKKNMPVEETAWSCCPKNWKSFSSNCYFISTESASWQDSEKDCARMEAHLLVINTQEEQDFIFQNLQEESAYFVGLSDPEGQRHWQWVDQTPYNESSTFWHPREPSDPNERCVVLNFRKSPKRWGWNDVNCLGPQRSVCEMMKIHL

SEQ ID NO: 2328 - DNA, 2051 bp, Homo sapien
agatcagctgatgccggagggtttgaagccgcgccgcgagggagcgaggtcgcagtgacagcggcgggcgatcggacccaggctgccccgccgtacccgcctgcgtcccgcgctcccgccccagcatgacagccccggcgggtccgcgcggctcagagaccgagcggcttctgacccccaaccccgggtatgggacccaggcggggccttcaccggcccctccgacacccccagaagaggaagaccttcgccgtcgtctcaaatactttttcatgagtccctgcgacaagtttcgagccaagggccgcaagccctgcaagctgatgctgcaagtggtcaagatcctggtggtcacggtgcagctcatcctgtttgggctcagtaatcagctggctgtgacattccgggaagagaacaccatcgccttccgacacctcttcctgctgggctactcggacggagcggatgacaccttcgcagcctacacgcgggagcagctgtaccaggccatcttccatgctgtggaccagtacctggcgttgcctgacgtgtcactgggccggtatgcgtatgtccgtggtgggggtgacccttggaccaatggctcagggcttgctctctgccagcggtactaccaccgaggccacgtggacccggccaacgacacatttgacattgatccgatggtggttactgactgcatccaggtggatccccccgagcggccccctccgccccccagcgacgatctcaccctcttggaaagcagctccagttacaagaacctcacgctcaaattccacaagctggtcaatgtcaccatccacttccggctgaagaccattaacctccagagcctcatcaataatgagatcccggactgctataccttcagcgtcctgatcacgtttgacaacaaagcacacagtgggcggatccccatcagcctggagacccaggcccacatccaggagtgtaagcaccccagtgtcttccagcacggagacaacagcttccggctcctgtttgacgtggtggtcatcctcacctgctccctgtccttcctcctctgcgcccgctcactccttcgaggcttcctgctgcagaacgagtttgtggggttcatgtggcggcagcggggacgggtcatcagcctgtgggagcggctggaatttgtcaatggctggtacatcctgctcgtcaccagcgatgtgctcaccatctcgggcaccatcatgaagatcggcatcgaggccaagaacttggcgagctacgacgtctgcagcatcctcctgggcacctcgacgctgctggtgtgggtgggcgtgatccgctacctgaccttcttccacaactacaatatcctcatcgccacactgcgggtggccctgcccagcgtcatgcgcttctgctgctgcgtggctgtcatctacctgggctactgcttctgtggctggatcgtgctggggccctatcatgtgaagttccgctcactctccatggtgtctgagtgcctgttctcgctcatcaatggggacgacatgtttgtgacgttcgccgccatgcaggcgcagcagggccgcagcagcctggtgtggctcttctcccagctctacctttactccttcatcagcctcttcatctacatggtgctcagcctcttcatcgcgctcatcaccggcgcctacgacaccatcaagcatcccggcggcgcaggcgcagaggagagcgagctgcaggcctacatcgcacagtgccaggacagccccacctccggcaagttccgccgcgggagcggctcggcctgcagccttctctgctgctgcggaagggacccctcggaggagcattcgctgctggtgaattgattcgacctgactgccgttggaccgtaggccctggactgcagagacccccgcccccgaccccgcttatttatttgtagggtttgcttttaaggatcggctccctgtcgcgcccgaggagggcctggacctttcgtgtcggacccttgggggcggggagactgggtggggagggtgttgaataaa

SEQ ID NO: 2329 - protein, 580 aa, Homo sapien
MTAPAGPRGSETERLLTPNPGYGTQAGPSPAPPTPPEEEDLRRRLKYFFMSPCDKFRAKGRKPCKLMLQVVKILVVTVQLILFGLSNQLAVTFREENTIAFRHLFLLGYSDGADDTFAAYTREQLYQAIFHAVDQYLALPDVSLGRYAYVRGGGDPWTNGSGLALCQRYYHRGHVDPANDTFDIDPMVVTDCIQVDPPERPPPPPSDDLTLLESSSSYKNLTLKFHKLVNVTIHFRLKTINLQSLINNEIPDCYTFSVLITFDNKAHSGRIPISLETQAHIQECKHPSVFQHGDNSFRLLFDVVVILTCSLSFLLCARSLLRGFLLQNEFVGFMWRQRGRVISLWERLEFVNGWYILLVTSDVLTISGTIMKIGIEAKNLASYDVCSILLGTSTLLVWVGVIRYLTFFHNYNILIATLRVALPSVMRFCCCVAVIYLGYCFCGWIVLGPYHVKFRSLSMVSECLFSLINGDDMFVTFAAMQAQQGRSSLVWLFSQLYLYSFISLFIYMVLSLFIALITGAYDTIKHPGGAGAEESELQAYIAQCQDSPTSGKFRRGSGSACSLLCCCGRDPSEEHSLLVN

SEQ ID NO: 2330 - DNA, 2857 bp, Homo sapien
aacagtattttccttttcaacacatctattgaaagtgttggataaatgcaggatgttaatatgctataaacataaagtctgtttttaaaaaatagcatttgaaaatcatgaagggctttttgttttcttttgtttgtatatatgtttattggtaacaggtgacactggaagcaatgaacaccacagtgatgcaaggcttcaacagatctgagcggtgccccagagacactcggatagtacagctggtattcccagccctctacacagtggttttcttgaccggcatcctgctgaatactttggctctgtgggtgtttgttcacatccccagctcctccaccttcatcatctacctcaaaaacactttggtggccgacttgataatgacactcatgcttcctttcaaaatcctctctgactcacacctggcaccctggcagctcagagcttttgtgtgtcgtttttcttcggtgatattttatgagaccatgtatgtgggcatcgtgctgttagggctcatagcctttgacagattcctcaagatcatcagacctttgagaaatatttttctaaaaaaacctgtttttgcaaaaacggtctcaatcttcatctggttctttttgttcttcatctccctgccaaatatgatcttgagcaacaaggaagcaacaccatcgtctgtgaaaaagtgtgcttccttaaaggggcctctggggctgaaatggcatcaaatggtaaataacatatgccagtttattttctggactgtttttatcctaatgcttgtgttttatgtggttattgcaaaaaaagtatatgattcttatagaaagtccaaaagtaaggacagaaaaaacaacaaaaagctggaaggcaaagtatttgttgtcgtggctgtcttctttgtgtgttttgctccatttcattttgccagagttccatatactcacagtcaaaccaacaataagactgactgtagactgcaaaatcaactgtttattgctaaagaaacaactctctttttggcagcaactaacatttgtatggatcccttaatatacatattcttatgtaaaaaattcacagaaaagctaccatgtatgcaagggagaaagaccacagcatcaagccaagaaaatcatagcagtcagacagacaacataaccttaggctgacaactgtacatagggttaacttctatttattgatgagacttccgtagataatgtggaaatcaaatttaaccaagaaaaaaagattggaacaaatgctctcttacattttattatcctggtgtacagaaaagattatataaaatttaaatccacatagatctattcataagctgaatgaaccattactaagagaatgcaacaggatacaaatggccactagaggtcattatttctttctttcttttttttttttttaatttcaagagcatttcactttaacattttggaaaagactaaggagaaacgtatatccctacaaacctcccctccaaacaccttctcacattcttttccacaattcacataacactactgcttttgtgccccttaaatgtagatatgtgctgaaagaaaaaaaaaacgcccaactcttgaagtccattgctgaaaactgcagccaggggttgaaagggatgcagacttgaagagtctgaggaactgaagtgggtcagcaagacctctgaaatcctgggtaaaggattttctccttacaattacaaacagcctctttcacattacaataatataccataggaggcacaagcaccattattaagccactttgcttacaccttaagtgtgtacaattcaagtgtgagaatgctgtgttaactattctttggaattctccttctgtccagcaaatactctaatgatggttaaacatggcacctactcagcaatgccttcctggaccacaacccctatccccctgccccaccctcctcattaaaaacaaatacttctactgtttgggtgtgtgatagggttctcaatgcagatctcccttttctagttagctatattcttgactgcatccgctaaaaatgttaaagcttcttgagagacagacatgccagattttcttggtatctcccataatacgacctacagtccatggtctacagatgttttaaatagaattgctattctcgatacatacaaagacgtaattgctgacccacaatcagtaacatccatattgggagatttttcaaaggatggtgaccctgcttgtatttatttaccttggtattttttcttgcatccttctgtgattcaaaaaagtaaaatgtggctttctgaaatgatggataagagtctacatcttctagaaaaaatacataaaggagtagttaagctctgtaaatgtgccacgagctccaacacgaccatcgtagggtgaagcccacgttttcttccatggcctcaaaggccctagaacttgcctacctttctggccttacctcctagctacttatccatctcttgaactttatactcttgtataaatttctaactttcagaaaatgccatactctgttttggcaccacacatgtatatttccccctggtacacttggaagactcttatccatctgtgaaaccctatgttgtcatcacttggtccatgaaatattacctggccaatatcccaccatcacctcaaacccaatcaccccctcctctgtatgctgtcacacctatattattaaacttatcacattgcattgtaattacttcctgacctttgtatctactcttttagtaactgatgtatatatctgaaaggagagattgtttcattgtgcaatcaataaatgtttgataaaataaagccc

SEQ ID NO: 2331 - protein, 333 aa, Homo sapien
MNTTVMQGFNRSERCPRDTRIVQLVFPALYTVVFLTGILLNTLALWVFVHIPSSSTFIIYLKNTLVADLIMTLMLPFKILSDSHLAPWQLRAFVCRFSSVIFYETMYVGIVLLGLIAFDRFLKIIRPLRNIFLKKPVFAKTVSIFIWFFLFFISLPNMILSNKEATPSSVKKCASLKGPLGLKWHQMVNNICQFIFWTVFILMLVFYVVIAKKVYDSYRKSKSKDRKNNKKLEGKVFVVVAVFFVCFAPFHFARVPYTHSQTNNKTDCRLQNQLFIAKETTLFLAATNICMDPLIYIFLCKKFTEKLPCMQGRKTTASSQENHSSQTDNITLG

SEQ ID NO: 2332 - DNA, 1890 bp, Homo sapien
gtgcggggtcaagctctccgccttgatggtggccactgggcgggcgcgtggagcccggcgggctgggcagcagccgccgccgccgctgcgagtcaacgtggtgctcagcggcctcctcggcaagttgtttccaggcccagcgcgagcgtcgcaactccggcacgagggcaaccgactgtaccgcgagcgccaggtggaggcggcactgctcaagtacaacgaggcagttaagttggctccaaatgaccacttgctttatagcaatcggtctcagatttatttcaccttggagtctcatgagaatgcactgcatgatgcagaaatagcatgtaagctccgcccgatgggttttaaggacaatctggagctcccacattgttctagtcaggaggaagcagcagccaggggagatggcagcagtctgatggacccagctaaagtgaagggggatggtcagcagcaccacatgaaagaccaggaagaagaggaggagaagtgggatgctacctctccaaaagctgcttccagcaagactggaaaatgccaggaaaagaaaaggaaacattgccagattgaatcccaagaagaaacggggatgcctaataaagcctccaagcaagatcctcccactgatcagggggacaaacctgctctcagtttaccacttgcatctttcgacgcatctgaccttgaatgcgctctatgtatgagattattctatgagccagtcacaacaccttgcgggcatactttttgcttaaaatgcctagaaagatgcctagatcacaacgcaaagtgtccattgtgcaaagacggtctttcacagtgcttggcatcaagaaaatacagcaaaaatgtaataatggaggagctcatagctaaattccttccagaagaactgaaggaacgaaggaagctttatgaagaggaaatggaagaactttctaaccttaataagaatgtgcctattttcgtgtgtactatggcctatcccaccgttccttgtcccctgcacatctttgagccttgttaccgcctgatgattcgtagatgcattgagacaggcacgagacagtttggcatgtgccttggagatcctgtcaaagggtttgcagaatatggctgcatcctagagatcagaaatgttcaattctttgctgatggccgctcagtggttgacagcataggcaagaggcgcttcagggtgctccatcagagccagcgggatggctacaacacagccgacattgaatacattgaagaccaaaaggttcagggagaggattgtgctgagctcatgggattacataactgtgtctatcagcaagcgtcattgtggtttcattcgctcaaattatccctaaagaatcggatactcaatcactttggtcccatgccggagaaagacgccgatcctcagatgaacccgaatggcccagcctggtgctggtggatgttagcagttcttcccttggaaagccgagctcagctccccttcctagcaatgaggtccttaaaggacagactgaatggtattcgacgagtcctggccttcatatcccgaaaccaaaactagtgagtggattgccgaagaggagctcccaccttccccactgccgtcggggggagtcttcttgtaaatatatctaattgcaataacatcttaacagaagggggtgtcaaacagaggcatcagcctgctgttgatcacagagagaaattgagtagaaagaccaaaagaatgtgacctatttgaaactttctgtcttaagatgcttcttgacatgctgcataactacataaacagcagaggtgtttaagagcccagaaaaacataatttgattttaacattaaaatttccaaaagtttaaaaaaaaaaaaaaaaaaaa

SEQ ID NO: 2333 - protein, 516 aa, Homo sapien
MVATGRARGARRAGQQPPPPLRVNVVLSGLLGKLFPGPARASQLRHEGNRLYRERQVEAALLKYNEAVKLAPNDHLLYSNRSQIYFTLESHENALHDAEIACKLRPMGFKDNLELPHCSSQEEAAARGDGSSLMDPAKVKGDGQQHHMKDQEEEEEKWDATSPKAASSKTGKCQEKKRKHCQIESQEETGMPNKASKQDPPTDQGDKPALSLPLASFDASDLECALCMRLFYEPVTTPCGHTFCLKCLERCLDHNAKCPLCKDGLSQCLASRKYSKNVIMEELIAKFLPEELKERRKLYEEEMEELSNLNKNVPIFVCTMAYPTVPCPLHIFEPCYRLMIRRCIETGTRQFGMCLGDPVKGFAEYGCILEIRNVQFFADGRSVVDSIGKRRFRVLHQSQRDGYNTADIEYIEDQKVQGEDCAELMGLHNCVYQQASLWFHSLKLSLKNRILNHFGPMPEKDADPQMNPNGPAWCWWMLAVLPLESRAQLPFLAMRSLKDRLNGIRRVLAFISRNQN

SEQ ID NO: 2334 - DNA, 3744 bp, Homo sapien
gacagacaggatggacttcctccggctatacctccctgggctgcaccaggccttgaggggggcactggattccctcggcacctttgtctcctacctcctgggagatgcagtccccactgtagagcgggaggcgcaggcggctgaggaactgggggtggtggcggtgggaaagacagggaagattgtagaggaggaagcccaggaggacctggagggccttagaggcagccaaaacgagggggctggaaggctgagagggcctggagatgacagaagacatgaagtggggagctcagctgtagaacagacctggggctggggagatggcagctcccatgggtcccaagcagagaggcaggacagtggggctggggagacagccaaggctgccaggtgccaggagccaagcgcccacttggaggccagaaagaaatccaaggcagggtctggggcttgccaagacaggagcggccaagcccaggagaggcaggagtcccatgagcaggaagtgaacagagaagagaggctgagaagctgggaacaggaggaggaggaggaagaggtcagggcaagagagccagggatggccagaggggcggagtcagagtggacctggcatggggagacggaggggaaggctggtgctgttgggccaaaggcggcaggggacaaccgggagatggagcagggggtcagggaggcagatgcaggggaaactgaggagcctggggccgaaggggctgggaaaggagaagaggtggtagtggtggagaaggcctgtgaaagcactagggcatgggggacgtggggcccaggggcagagcctgaggactggggaatcttaggcagagaggaggccaggacaaccccaggtagggaagaggccagggcaattttagatggggaggaagccaggacaatctcaggcggggaggaggctgagacagcctcaggcggggaggaggctgaaacagcctcaggcggggaggaggccgggacagcctcgggaggggaggaggccgggatatcctcaggcggggaggctgggacagcctcaggaggggaggaggccgggacagcctcaggaggggacgaggcctggacaacctcaggcaaagaggaggctgacctgctgggagtcagacagactcaatatggagcagttccaggagaaaggctcctagaggctactggaaaagtctgggtcctagaggaggagggggatgaggagagagaggctgaggtgagccctttccccaaacaggcccaggtcctgggcactgaaagaacagaagaggctgctgagagccagaccgcagggagggaagctgtgggaggccaggaggcaggggagagctttgagggccaggtagacctgcgtggtaaggaggctgagatgaggcaggacttggggatcagggccgaccgggccaggatggaagagctggtacaggcagaggaggcccaggaggagagagggagcagcagggatccagtggctgagctgccctcagatggagaggctgaaggcactgccgacttggaggcaactccagaggccaggcctgaggaggagctcacaggggaggagagtgaggcggcccagactagctgtggcctactgggcgtggaatggggtggcctcacacacagcgtcaccaaaggccagggacctgagctgatggggggtgcccagaccccaactaagcaacccgaggaaagggaggcaggggaggtggagctcatgggagttctggccctgagcaaagaggagcaggagaggagcctggaggcaggtcccaggcacgcggggtctgtaaagcctgaggcctccgaggccttcccaggagcctgggaaaaccgcacgagaaaggacatggagagaggaaatactcaggaggatgcggccgatggcgagcagcgggaggaggaggagactgcgggaggccagaccctggcggctgaggctgaaggagaccgagagtctgaactatcagaagtcccagaggcaggcggggaggggctgacaacccaggacgcgggatgtggaactgaggagggagaggcatctgtctcagagaaccaggagctggacggaagcacaggggcagacgcagggccttgcccgtcactgggagaggcctatgccagagaaactgaggatgaggaggcggaggctgacagaacatccagaagaggctggaggctgcaagcggtggctgtgggcctcccggaccgtgaggatgcacagactggctctgtggctgctgggattatggggggtgatgtggtcccacacatcagcgctgctggcgctggtgaagctttggaaggggcgcttgggcaaggctgggactcgaaagaaaaggaagaggcagcagcaggagagcatgcaggtgggcaagaatttggtctggagggctcagcagaggaagaggtgactggcagaggcagccaagtagaggcttttgagtccagggagggaggaccttggggagggcgggtagaggccgaggaatctgcaggcgcagaggacagctgtgggctggatcccgcgggctcccagacagcgagggcagaggggatgggagccatggtggaggctggggggcttctagaaaagtggacgctgttggaagaagaggctgttggatggcaggagagagaacagagggaagacagtgaggggcggtgtggggactaccaccctgagggagaggcaccaaggctccttgatgcagagggtctcatggtgaccgggggccggagggcagaggccaaggagactgagccagaaagcctggaacatgtcaggggccaggaggagcagccaacacaccaggcccctgcagaagctgcgccggagtcagtcggggaagccgagacggctgaggccatgggcagtgccagaggaggtgctgccaacagctggagcgaggccccgctccccgggtccctcctagacgtctctgtcccaaggagtcgcgtgcacctctcgagaagctcctcacagcgtcgctcccggccctcttttcgtcggactccggcctgggagcagcaggaggagcccccagcccccaaccctcctgaggaggagctgtcagctcctgagcagagacccctccagctggaggaacccctggagccaagccctctgaggcatgatgggaccccggtgccagccaggagaaggcccctgggacacgggtttggcctcgcgcaccctggcatgatgcaggagctgcaagcccgtctgggccggcctaagccccagtgactgagacccggtgctctgggagccaggccctgagtgggtgccagaaggcttgctccaatgccactgagccctgctccctctgccactgtggacacatcctctccaccctctgggcctcagtgtcttgatgtatcattcatggagcaggcaaaaccagacgtctgggaataccgtgaacttaaggagtctgattctccgacacaggctggtggaccacctaccccactgagaccacctctcagggtgcctgccctggttcctccccagcctgagtcagctgtctggactgcaaggaggctgggcacgggggctcacgcctgtcaccccagagctttgggaggccaaggtgggaggatcgcttgagaccaggagttcgagaccagcctgggcagcatagcaagatccccatcttttaaaaacaaaataaaacaataaagactgcaaggaaaaaaaaaaaaaaaaaaaaa

SEQ ID NO: 2335 - protein, 1088 aa, Homo sapien
MDFLRLYLPGLHQALRGALDSLGTFVSYLLGDAVPTVEREAQAAEELGVVAVGKTGKIVEEEAQEDLEGLRGSQNEGAGRLRGPGDDRRHEVGSSAVEQTWGWGDGSSHGSQAERQDSGAGETAKAARCQEPSAHLEARKKSKAGSGACQDRSGQAQERQESHEQEVNREERLRSWEQEEEEEEVRAREPGMARGAESEWTWHGETEGKAGAVGPKAAGDNREMEQGVREADAGETEEPGAEGAGKGEEVVVVEKACESTRAWGTWGPGAEPEDWGILGREEARTTPGREEARAILDGEEARTISGGEEAETASGGEEAETASGGEEAGTASGGEEAGISSGGEAGTASGGEEAGTASGGDEAWTTSGKEEADLLGVRQTQYGAVPGERLLEATGKVWVLEEEGDEEREAEVSPFPKQAQVLGTERTEEAAESQTAGREAVGGQEAGESFEGQVDLRGKEAEMRQDLGIRADRARMEELVQAEEAQEERGSSRDPVAELPSDGEAEGTADLEATPEARPEEELTGEESEAAQTSCGLLGVEWGGLTHSVTKGQGPELMGGAQTPTKQPEEREAGEVELMGVLALSKEEQERSLEAGPRHAGSVKPEASEAFPGAWENRTRKDMERGNTQEDAADGEQREEEETAGGQTLAAEAEGDRESELSEVPEAGGEGLTTQDAGCGTEEGEASVSENQELDGSTGADAGPCPSLGEAYARETEDEEAEADRTSRRGWRLQAVAVGLPDREDAQTGSVAAGIMGGDVVPHISAAGAGEALEGALGQGWDSKEKEEAAAGEHAGGQEFGLEGSAEEEVTGRGSQVEAFESREGGPWGGRVEAEESAGAEDSCGLDPAGSQTARAEGMGAMVEAGGLLEKWTLLEEEAVGWQEREQREDSEGRCGDYHPEGEAPRLLDAEGLMVTGGRRAEAKETEPESLEHVRGQEEQPTHQAPAEAAPESVGEAETAEAMGSARGGAANSWSEAPLPGSLLDVSVPRSRVHLSRSSSQRRSRPSFRRTPAWEQQEEPPAPNPPEEELSAPEQRPLQLEEPLEPSPLRHDGTPVPARRRPLGHGFGLAHPGMMQELQARLGRPKPQ

SEQ ID NO: 2336 - DNA, 2288 bp, Homo sapien
gcctgtcgcaggcgtgcagggacctggactccgcctcgtccccggggctcgggcagccgagccatggcggggaactgtggggcccgcggcgcgctgtcggcgcacacgctgctgttcgacctgccgcccgcgctgctcggagagctctgcgctgttctggacagctgcgacggcgcgctgggctggcgcggcctggcagagagactttcaagcagctggctggatgttcgtcatattgaaaagtatgtagaccaaggtaaaagtggaacaagagaattactttggtcctgggcacagaaaaacaagaccatcggtgaccttttacaggtcctccaggagatgggacatcgtcgagctattcatttaattacaaactatggagcagtgttgagtccttcagagaagagttatcaggaaggtggatttccaaatatattattcaaggaaacagccaatgtcaccgtggataatgttcttattcctgaacataatgaaaaaggagtactgcttaaatcttccatcagctttcaaaatatcatagaaggaactagaaatttccacaaagacttcctaattggagaaggagagatttttgaggtatacagagtggagattcaaaacctaacatatgctgtcaaattatttaaacaggagaaaaaaatgcagtgtaagaagcattggaagaggtttttatctgagcttgaagttttactactgtttcatcacccaaacatactagagttggctgcatattttacagagactgagaagttctgtctgatttatccatacatgagaaatggaacactttttgacagattgcagtgtgtaggtgacacggccccactcccttggcacattcgaatcggtatattaataggaatatccaaagccattcactacctgcacaacgttcaaccatgctcggtcatctgtggcagtatatcaagtgcaaacatccttttggatgatcagtttcaacccaaactaactgattttgccatggcacacttccggtcccacctagaacatcagagttgtaccataaatatgaccagcagcagcagtaaacatctgtggtacatgccagaagagtacatcagacaggggaaactttccattaaaacagatgtctacagctttggaattgtaataatggaagttctaacaggatgtagagtagtgttagatgatccaaaacatatccagctgcgggatctccttagagaattgatggagaagagaggcctggattcatgtctctcatttctagataagaaagtgcctccctgccctcggaatttctctgccaagctcttctgtttggcaggccggtgtgctgcaacgcgggcaaagttaagaccatcaatggatgaagttttaaatactcttgaaagtactcaagccagcttgtattttgctgaagatcctcccacatcactaaagtccttcaggtgtccttctcctctattcctggagaatgtaccaagtattccagtggaagatgatgaaagccagaataacaatttactaccttctgatgaaggcctgaggatagacagaatgactcagaaaactccttttgaatgcagccagtctgaggttatgtttctgagcttggacaaaaagccagagagcaagagaaatgaggaagcttgcaacatgcccagttcttcttgtgaagaaagttggttcccaaagtatatagttccatcccaggacttaaggccctataaggtaaatatagatccttcttcagaagctccagggcattcttgcaggagcaggccagtggagagcagctgttcctccaaattttcctgggatgaatatgaacagtacaaaaaagaataaattctaccagaagataaagaaaaaagcaagtattgcataggcacctgagcataggtatgaccttgggaagacattggctccataagcaatgccaagagaatgatcaatagtgagtttgggtgatgcagataaacaatctggataattccatttcttttttcccaaaccctcaaacagagtgccttaaaaaattgttttatcaggataattgtctcatgaccaaatccacgctcaattagagccattcaaaattccttaagatcatgggttctgacttcagccaaacaaaacaatcaaaacctaccaaaaagggactggattgtaatgtcctctccatcatcctcagtgtgagtcctcagagcctccatctgccaagaacattcagttggattccatcgtttggtttagcttgcttgcacgggttgtaggaaatg

SEQ ID NO: 2337 - protein, 596 aa, Homo sapien
MAGNCGARGALSAHTLLFDLPPALLGELCAVLDSCDGALGWRGLAERLSSSWLDVRHIEKYVDQGKSGTRELLWSWAQKNKTIGDLLQVLQEMGHRRAIHLITNYGAVLSPSEKSYQEGGFPNILFKETANVTVDNVLIPEHNEKGVLLKSSISFQNIIEGTRNFHKDFLIGEGEIFEVYRVEIQNLTYAVKLFKQEKKMQCKKHWKRFLSELEVLLLFHHPNILELAAYFTETEKFCLIYPYMRNGTLFDRLQCVGDTAPLPWHIRIGILIGISKAIHYLHNVQPCSVICGSISSANILLDDQFQPKLTDFAMAHFRSHLEHQSCTINMTSSSSKHLWYMPEEYIRQGKLSIKTDVYSFGIVIMEVLTGCRVVLDDPKHIQLRDLLRELMEKRGLDSCLSFLDKKVPPCPRNFSAKLFCLAGRCAATRAKLRPSMDEVLNTLESTQASLYFAEDPPTSLKSFRCPSPLFLENVPSIPVEDDESQNNNLLPSDEGLRIDRMTQKTPFECSQSEVMFLSLDKKPESKRNEEACNMPSSSCEESWFPKYIVPSQDLRPYKVNIDPSSEAPGHSCRSRPVESSCSSKFSWDEYEQYKKE

SEQ ID NO: 2338 - DNA, 2076 bp, Homo sapien
cagtcttgtttcgggttccggctgcgttgggcttgcgtgcggctcgctaagactatggcgtccgggcctcattcgacagctactgctgccgcagccgcctcatcggccgccccaagcgcgggcggctccagctccgggacgacgaccacgacgacgaccacgacgggagggatcctgatcggcgatcgcctgtactcggaagtttcacttaccatcgaccactctctgattccggaggagaggctctcgcccaccccatccatgcaggatgggctcgacctgcccagtgagacggacttacgcatcctgggctgcgagctcatccaggccgccggcattctcctccggctgccgcaggtggcgatggcaacggggcaggtgttgtttcatcgttttttctactccaaatctttcgtcaaacacagtttcgagattgttgctatggcttgtattaatcttgcatcaaaaatcgaagaagcacctagaagaataagagatgtgattaatgtattccaccacctccgccagttaagaggaaaaaggactccaagccccctgatccttgatcagaactacattaacaccaaaaatcaagttatcaaagcagagaggagggtgctaaaggagttgggattttgtgttcatgtcaagcatcctcataagatcattgttatgtatttacaagtcttagaatgtgaacgtaatcaaaccctggttcaaactgcctggaattacatgaatgacagtcttcgaaccaatgtgtttgttcgatttcaaccagagactatagcatgtgcttgcatctaccttgcagctagagcacttcagattccgttgccaactcgtccccattggtttcttctttttggtactacagaagaggaaatccaggaaatctgcatagaaacacttaggctttataccagaaaaaagccaaactatgaattactggaaaaagaagtagaaaaaagaaaagtagccttacaagaagccaaattaaaagcaaagggattgaatccggatggaactccagccctttcaaccctgggtggattttctccagcctccaagccatcatcaccaagagaagtaaaagctgaagagaaatcaccaatctccattaatgtgaagacagtcaaaaaagaacctgaggatagacaacaggcttccaaaagcccttacaatggtgtaagaaaagacagcaagagaagtagaaatagcagaagtgcaagtcgatcgaggtcaagaacacgatcacgttctagatcacatactccaagaagacactataataataggcggagtcgatctggaacatacagctcgagatcaagaagcaggtcccgcagtcacagtgaaagccctcgaagacatcataatcatggttctcctcaccttaaggccaagcataccagagatgatttaaaaagttcaaacagacatggtcataaaaggaaaaaatctcgttctcgatctcagagcaagtctcgggatcactcagatgcagccaagaaacacaggcatgaaaggggacatcatagggacaggcgtgaacgatctcgctcctttgagaggtcccataaaagcaagcaccatggtggcagtcgctcaggacatggcaggcacaggcgctgactttgtcttcctttgagcctgcatcagttcttggttttgcctatctaccagtgtgatgtatggactcaatcaaaaacattaaacgcaaaactgattaggatttgatttcttgaaaccctctaggtctctagaacactgaggacagtttcttttgaaaagaactatgttaatttttttgcacattaaaatgccctagcagtatctaattaaaaaccatggtcaggttcaattgtactttattatagttgtgtattgtttattgctataagaactggagcgtgaattctgtaaaaatgtatcttatttttatacagataaaattgcagacactgttctatttaagtggttatttgtttaaatgatggtgaatactttcttaacactggtttgtctgcatgtgtaaagatttttacaaggaaataaaatacaaatcttgttttt

SEQ ID NO: 2339 - protein, 526 aa, Homo sapien
MASGPHSTATAAAAASSAAPSAGGSSSGTTTTTTTTTGGILIGDRLYSEVSLTIDHSLIPEERLSPTPSMQDGLDLPSETDLRILGCELIQAAGILLRLPQVAMATGQVLFHRFFYSKSFVKHSFEIVAMACINLASKIEEAPRRIRDVINVFHHLRQLRGKRTPSPLILDQNYINTKNQVIKAERRVLKELGFCVHVKHPHKIIVMYLQVLECERNQTLVQTAWNYMNDSLRTNVFVRFQPETIACACIYLAARALQIPLPTRPHWFLLFGTTEEEIQEICIETLRLYTRKKPNYELLEKEVEKRKVALQEAKLKAKGLNPDGTPALSTLGGFSPASKPSSPREVKAEEKSPISINVKTVKKEPEDRQQASKSPYNGVRKDSKRSRNSRSASRSRSRTRSRSRSHTPRRHYNNRRSRSGTYSSRSRSRSRSHSESPRRHHNHGSPHLKAKHTRDDLKSSNRHGHKRKKSRSRSQSKSRDHSDAAKKHRHERGHHRDRRERSRSFERSHKSKHHGGSRSGHGRHRR

SEQ ID NO: 2340 - DNA, 4485 bp, Homo sapien
gtagacagatccaggctcaccagtcctgtgccactgggcttttggcgttctgcacaaggcctacccgcagatgccatgcctgctcccccagcctaatgggctttgatgggggaagagggtggttcagcctctcacgatgaggaggaaagagcaagtgtcctcctcggacattctccgggttgtgaaatgtgctcgcaggaggcttttcaggcacagaggagccagctggtcgagctgctggtctcagggtccctggaaggcttcgagagtgtcctggactggctgctgtcctgggaggtcctctcctgggaggactacgagggcttccacctcctgggccagcctctctcccacttggccaggcgccttctggacaccgtctggaataagggtacttgggcctgtcagaagctcatcgcggctgcccaagaagcccaggccgacagccagtcccccaagctgcatggctgctgggacccccactcgctccacccagcccgagacctgcagagtcaccggccagccattgtcaggaggctccacagccatgtggagaacatgctggacctggcatgggagcggggtttcgtcagccagtatgaatgtgatgaaatcaggttgccgatcttcacaccgtcccagagggcaagaaggctgcttgatcttgccacggtgaaagcgaatggattggctgccttccttctacaacatgttcaggaattaccagtcccattggccctgcctttggaagctgccacatgcaagaagtatatggccaagctgaggaccacggtgtctgctcagtctcgcttcctcagtacctatgatggagcagagacgctctgcctggaggacatatacacagagaatgtcctggaggtctgggcagatgtgggcatggctggacccccgcagaagagcccagccaccctgggcctggaggagctcttcagcacccctggccacctcaatgacgatgcggacactgtgctggtggtgggtgaggcgggcagtggcaagagcacgctcctgcagcggctgcacttgctgtgggctgcagggcaagacttccaggaatttctctttgtcttcccattcagctgccggcagctgcagtgcatggccaaaccactctctgtgcggactctactctttgagcactgctgttggcctgatgttggtcaagaagacatcttccagttactccttgaccaccctgaccgtgtcctgttaacctttgatggctttgacgagttcaagttcaggttcacggatcgtgaacgccactgctccccgaccgaccccacctctgtccagaccctgctcttcaaccttctgcagggcaacctgctgaagaatgcccgcaaggtggtgaccagccgtccggccgctgtgtcggcgttcctcaggaagtacatccgcaccgagttcaacctcaagggcttctctgaacagggcatcgagctgtacctgaggaagcgccatcatgagcccggggtggcggaccgcctcatccgcctgctccaagagacctcagccctgcacggtttgtgccacctgcctgtcttctcatggatggtgtccaaatgccaccaggaactgttgctgcaggagggggggtccccaaagaccactacagatatgtacctgctgattctgcagcattttctgctgcatgccacccccccagactcagcttcccaaggtctgggacccagtcttcttcggggccgcctccccaccctcctgcacctgggcagactggctctgtggggcctgggcatgtgctgctacgtgttctcagcccagcagctccaggcagcacaggtcagccctgatgacatttctcttggcttcctggtgcgtgccaaaggtgtcgtgccagggagtacggcgcccctggaattccttcacatcactttccagtgcttctttgccgcgttctacctggcactcagtgctgatgtgccaccagctttgctcagacacctcttcaattgtggcaggccaggcaactcaccaatggccaggctcctgcccacgatgtgcatccaggcctcggagggaaaggacagcagcgtggcagctttgctgcagaaggccgagccgcacaaccttcagatcacagcagccttcctggcagggctgttgtcccgggagcactggggcctgctggctgagtgccagacatctgagaaggccctgctccggcgccaggcctgtgcccgctggtgtctggcccgcagcctccgcaagcacttccactccatcccgccagctgcaccgggtgaggccaagagcgtgcatgccatgcccgggttcatctggctcatccggagcctgtacgagatgcaggaggagcggctggctcggaaggctgcacgtggcctgaatgttgggcacctcaagttgacattttgcagtgtgggccccactgagtgtgctgccctggcctttgtgctgcagcacctccggcggcccgtggccctgcagctggactacaactctgtgggtgacattggcgtggagcagctgctgccttgccttggtgtctgcaaggctctgtatttgcgcgataacaatatctcagaccgaggcatctgcaagctcattgaatgtgctcttcactgcgagcaattgcagaagttagctctattcaacaacaaattgactgacggctgtgcacactccatggctaagctccttgcatgcaggcagaacttcttggcattgaggctggggaataactacatcactgccgcgggagcccaagtgctggccgaggggctccgaggcaacacctccttgcagttcctgggattctggggcaacagagtgggtgacgagggggcccaggccctggctgaagccttgggtgatcaccagagcttgaggtggctcagcctggtggggaacaacattggcagtgtgggtgcccaagccttggcactgatgctggcaaagaacgtcatgctagaagaactctgcctggaggagaaccatctccaggatgaaggtgtatgttctctcgcagaaggactgaagaaaaattcaagtttgaaaatcctgaagttgtccaataactgcatcacctacctaggggcagaagccctcctgcaggcccttgaaaggaatgacaccatcctggaagtctggctccgagggaacactttctctctagaggaggttgacaagctcggctgcagggacaccagactcttgctttgaagtctccgggaggatgttcgtctcagtttgtttgtgagcaggctgtgagtttgggccccagaggctgggtgacatgtgttggcagcctcttcaaaatgagccctgtcctgcctaaggctgaacttgttttctgggaacaccataggtcacctttattctggcagaggagggagcatcagtgccctccaggatagacttttcccaagcctacttttgccattgacttcttcccaagattcaatcccaggatgtacaaggacagcccctcctccatagtatgggactggcctctgctgatcctcccaggcttccgtgtgggtcagtggggcccatggatgtgcttgttaactgagtgccttttggtggagaggcccggcctctcacaaaagaccccttaccactgctctgatgaagaggagtacacagaacacataattcaggaagcagctttccccatgtctcgactcatccatccaggccattccccgtctctggttcctcccctcctcctggactcctgcacacgctccttcctctgaggctgaaattcagaatattagtgacctcagctttgatatttcacttacagcacccccaaccctggcacccagggtgggaagggctacaccttagcctgccctcctttccggtgtttaagacatttttggaaggggacacgtgacagccgtttgttccccaagacattctaggtttgcaagaaaaatatgaccacactccagctgggatcacatgtggacttttatttccagtgaaatcagttactcttcagttaagcctttggaaacagctcgactttaaaaagctccaaatgcagctttaaaaaattaatctgggccagaatttcaaacggcctcactaggcttctggttgatgcctgtgaactgaactctgacaacagacttctgaaatagacccacaagaggcagttccatttcatttgtgccagaatgctttaggatgtacagttatggattgaaagtttacaggaaaaaaaattaggccgttccttcaaagcaaatgtcttcctggattattcaaaatgatgtatgttgaagcctttgtaaattgtcagatgctgtgcaaatgttattattttaaacattatgatgtgtgaaaactggttaatatttataggtcactttgttttactgtcttaagtttatactcttatagacaacatggccgtgaactttatgctgtaaataatcagaggggaataaactgttgagtcaaaac

SEQ ID NO: 2341 - protein, 1040 aa, Homo sapien
MGEEGGSASHDEEERASVLLGHSPGCEMCSQEAFQAQRSQLVELLVSGSLEGFESVLDWLLSWEVLSWEDYEGFHLLGQPLSHLARRLLDTVWNKGTWACQKLIAAAQEAQADSQSPKLHGCWDPHSLHPARDLQSHRPAIVRRLHSHVENMLDLAWERGFVSQYECDEIRLPIFTPSQRARRLLDLATVKANGLAAFLLQHVQELPVPLALPLEAATCKKYMAKLRTTVSAQSRFLSTYDGAETLCLEDIYTENVLEVWADVGMAGPPQKSPATLGLEELFSTPGHLNDDADTVLVVGEAGSGKSTLLQRLHLLWAAGQDFQEFLFVFPFSCRQLQCMAKPLSVRTLLFEHCCWPDVGQEDIFQLLLDHPDRVLLTFDGFDEFKFRFTDRERHCSPTDPTSVQTLLFNLLQGNLLKNARKVVTSRPAAVSAFLRKYIRTEFNLKGFSEQGIELYLRKRHHEPGVADRLIRLLQETSALHGLCHLPVFSWMVSKCHQELLLQEGGSPKTTTDMYLLILQHFLLHATPPDSASQGLGPSLLRGRLPTLLHLGRLALWGLGMCCYVFSAQQLQAAQVSPDDISLGFLVRAKGVVPGSTAPLEFLHITFQCFFAAFYLALSADVPPALLRHLFNCGRPGNSPMARLLPTMCIQASEGKDSSVAALLQKAEPHNLQITAAFLAGLLSREHWGLLAECQTSEKALLRRQACARWCLARSLRKHFHSIPPAAPGEAKSVHAMPGFIWLIRSLYEMQEERLARKAARGLNVGHLKLTFCSVGPTECAALAFVLQHLRRPVALQLDYNSVGDIGVEQLLPCLGVCKALYLRDNNISDRGICKLIECALHCEQLQKLALFNNKLTDGCAHSMAKLLACRQNFLALRLGNNYITAAGAQVLAEGLRGNTSLQFLGFWGNRVGDEGAQALAEALGDHQSLRWLSLVGNNIGSVGAQALALMLAKNVMLEELCLEENHLQDEGVCSLAEGLKKNSSLKILKLSNNCITYLGAEALLQALERNDTILEVWLRGNTFSLEEVDKLGCRDTRLLL

SEQ ID NO: 2342 - DNA, 1842 bp, Homo sapien
gcgcgccacggcaggaaagggcggtcctgcgctgtggcccacgctcgctcccgctgtcggactctgggcctggaccgcgcgtggccggcgccaaaagcgagaggcatgagcgcgcgcccgggccagtgaactgctcggggatggactgcggctcggtcggcggccagaggacccagcgcctgcccggccgccagcggcttctcttcttgcccgtgggcctcagcggaagaccgggcggcagcgaaacctcagcacgccgctgcccctctgcgctctccgacggtctgggggcgctgcgccctcgcgccccggcggcccgcggcggcgtgtcacgtgcctcaccgctgctcctcctcctgctagtgccctccccgcgcttggccgccgcagccccgcgccggcagctcggggactgggagcgctcgcgcctcgggtatgccgcacccccggccgggcgcagcggcgcgtggaggtgctcaccgggcgtcgccgctgccgccggcgcccttccccagtaccacggcccggcgcctgcactcgtttcctgcaggagagagctaagcttgtctgctggatccctgcagctggagcgcaaaaggagagatttcacctcttctgggagcaggaaactctacttcgacactcatgccttagtgtgcttactggaagacaatgaatctcactctttcatccaggctggagtgcagtggcacagtcttggcctactgcaacccccacctcccggtttcaagcgatcctcccacctcatcctcctgagtagctgggattacaggcatgcaccaccacacctggataatttttctgtatttttactagagacggggtttcaccatgttggccaggctggtctcaaactgctgacctcaagtgatccacccaccttggcctcctaaagtgctgggattacaggcgtgaaccactgtgtccagttgccaaacctaattatgtttaaacatgaactctttttttaattaaaattttttaaaattttatttacattaaaatggagatgggatcactatgttgcccatgctggttctgaactcctgggctcaaagatcctcccgccttggtctcccagagtgttaggattacaggcgtgagccaccacacccagccagtgaactcttcttaataaaactttaaaatttggcaaaagtttagtttgagtttttaaaaactaggaagacagacgagaaaaaagaaaacagagtcagagctaaacaatgttaacattttgggtttgctactcaacaagcagaaatcattgtgtctgcattggtcaagatcctggaggccaacatggacatcgtctacaaagatatggtcaccaagatgcagcaggaaatcacttttcagcaagtaatgtctcagattgcgaatgtgaaaaaggatatgattattttggagaagagtgaattttcagccctcagagcagaaaatgagaaaataaaactcgaactacatcagttaaaacaacaagtaatggatgaagtgatcaaagtccgaacagataccaaattagacttcaacctagaaaagagcagagtaaaagaattgtattcattgaacgaaaagaagctgctggaattgagaacagaaatagtggcattgcatgcccagcaagatcgggcccttacccagacagacaggaagatcgaaactgaggttgctggcctcaaaaccatgcttgagtcacacaagcttgataatattaaatatttagcagggtctatatttacgtgcctaacagtagctctgggattttatcgcctgtggatctaataaagtgtctatttaaagtgaaaaaaaaaaaaaaaa

SEQ ID NO: 2343 - protein, 257 aa, Homo sapien
MDCGSVGGQRTQRLPGRQRLLFLPVGLSGRPGGSETSARRCPSALSDGLGALRPRAPAARGGVSRASPLLLLLLVPSPRLAAAAPRRQLGDWERSRLGYAAPPAGRSGAWRCSPGVAAAAGALPQYHGPAPALVSCRRELSLSAGSLQLERKRRDFTSSGSRKLYFDTHALVCLLEDNESHSFIQAGVQWHSLGLLQPPPPGFKRSSHLILLSSWDYRHAPPHLDNFSVFLLETGFHHVGQAGLKLLTSSDPPTLAS

SEQ ID NO: 2344 - DNA, 2598 bp, Homo sapien
attccaagtcgctgctgtgcagagcagcaagtgctccgtgcagggctgttgctatcacttggaggtgaacagcctcttttgccggtattcagtgaagaaagcaagtctaaatatgcagttctctcactggagtgaaagatgttttgttcatttctaatcaactatgctagacagctgcaagctgaaaagtgcctgcaatttgccatttatttgtaataagaaaataataaacactgctggaaccagtaatgcagaagtccccttggctgatcccggaatgtaccagctggacattacattaagaaggggtcaaagtttagctgctcgagatcgaggagggacgagtgatccatatgtgaagtttaaaatcggaggaaaagaagtttttagaagtaagataatacacaagaacctcaaccctgtgtgggaagaaaaagcttgtattctggttgatcatcttagggagccattgtatataaaggtatttgactatgattttggactacaggatgactttatgggctcagcctttctggatctgacacaattggagttaaacaggcccacagatgtgacccttactctgaaagatcctcattatcctgaccatgatcttggaatcattttgctctcagtcatccttacccctaaagaaggagagtccagggatgtgacaatgctaatgaggaagagttggaaaagatcaagtaagtttcagacccaaagtttacgcctatcagacctacacagaaaatcgcatctttggagaggaatagtcagcatcaccttgattgaagggagagacctcaaggccatggattccaacgggttgagcgatccctacgtgaagttccggcttgggcatcagaagtacaagagcaagattatgccaaaaacgttgaatcctcagtggagggaacaatttgattttcacctttatgaagaaagaggaggagtcattgatatcactgcatgggacaaagatgctgggaaaagggatgatttcattggcaggtgccaggtcgacctgtcagccctcagtagggaacagacgcacaagctggagttgcagctggaagagggtgagggacacctggtgctgctggtcactctgacagcatcagccacagtcagcatctctgacctgtctgtcaactccctggaggaccagaaggaacgagaggagatattaaagaaatatagcccattgaggatatttcacaacctgaaagatgtgggatttctccaggtgaaagtcatcagagcggaagggttaatggctgccgacgtcactggaaaaagtgacccattttgtgtggtagaactgaacaacgatagactgctaacacatactgtctacaaaaatctcaatcctgagtggaataaagtcttcacgttcaacattaaagatatccattcagttcttgaagtgacagtttatgatgaagatcgggatcgaagtgctgactttctgggcaaagttgctataccattgctgtctattcaaaatggtgaacagaaagcctacgtcttgaaaaacaagcagctgacagggccaacaaagggggtcatctatcttgaaatagatgtgatttttaatgctgtgaaagccagcttacgaacattaatacccaaagaacagaagtacattgaagaggaaaacagactctctaaacagctgctactaagaaactttatcagaatgaaacgttgtgtcatggtgctggtaaatgctgcatactacgttaatagttgctttgattgggattcacccccaaggagtctcgctgcttttgtggtagtggaggacatgctagaggacgaggaagaagaagatgacaaagatgacaaggacagtgaaaaaaagggatttataaataaaatctatgccatccaggaggtatgtgtcagtgtccagaacatcctagatgaagtggcttcctttggcgaaaggataaagaatactttcaactggactgtcccattcttaagctggctggccattgtagccctctgtgtgttcacagccatcctgtactgcattccgctgagatacattgtccttgtctggggcatcaataaatttacaaaaaagcttcggagtccatatgcaattgataacaatgaactacttgacttcctttccagagtcccttcagatgtacaagtggtgcaataccaagaactgaaaccagatccttctcatagcccatataaaagaaagaaaaacaatcttggctagccagctcccagcaatgaggagaccagcatctgtttgggaagataaaagaaaaagccctcagcctcagcagcatttcctttctttctgctttttatttattttgcctttttatcatgatcgagagaatctgtaaatagtgtacaaaggcatatgtctttgaatatatacttctattgtacagactcaacttgataaaggttttgctactgctgtgtcaaaaccttgttagctgtggataataatataacacactgaaagaacaaatataagaatgataacactggaagatatattcttatctaattactagtggattaaatactcacctgtgctctgattaaatctacatcaattgt

SEQ ID NO: 2345 - protein, 692 aa, Homo sapien
MLDSCKLKSACNLPFICNKKIINTAGTSNAEVPLADPGMYQLDITLRRGQSLAARDRGGTSDPYVKFKIGGKEVFRSKIIHKNLNPVWEEKACILVDHLREPLYIKVFDYDFGLQDDFMGSAFLDLTQLELNRPTDVTLTLKDPHYPDHDLGIILLSVILTPKEGESRDVTMLMRKSWKRSSKFQTQSLRLSDLHRKSHLWRGIVSITLIEGRDLKAMDSNGLSDPYVKFRLGHQKYKSKIMPKTLNPQWREQFDFHLYEERGGVIDITAWDKDAGKRDDFIGRCQVDLSALSREQTHKLELQLEEGEGHLVLLVTLTASATVSISDLSVNSLEDQKEREEILKKYSPLRIFHNLKDVGFLQVKVIRAEGLMAADVTGKSDPFCVVELNNDRLLTHTVYKNLNPEWNKVFTFNIKDIHSVLEVTVYDEDRDRSADFLGKVAIPLLSIQNGEQKAYVLKNKQLTGPTKGVIYLEIDVIFNAVKASLRTLIPKEQKYIEEENRLSKQLLLRNFIRMKRCVMVLVNAAYYVNSCFDWDSPPRSLAAFVVVEDMLEDEEEEDDKDDKDSEKKGFINKIYAIQEVCVSVQNILDEVASFGERIKNTFNWTVPFLSWLAIVALCVFTAILYCIPLRYIVLVWGINKFTKKLRSPYAIDNNELLDFLSRVPSDVQVVQYQELKPDPSHSPYKRKKNNLG

SEQ ID NO: 2346 - DNA, 1796 bp, Homo sapien
ctgggctcgggtgatcctcctgtcttagccttccaaggtgctgggattacaggtgtgggccaccatgcccagccaccatcttggtttaatttctttccttggaaatggagcaaagggctttcactcttctttttcatggctgcatagtattccataattgtttaaacaattgataatagacactgtatcggggtgactggtatacccccaaaatcacatctgcccagagcctcaggacatggccttgtttggaaatggttttagcagatgcagctaagatgaggtcaccccgtgttaggatggccccgaatccagtgcctggcacccttataaggagagggaaacttggacgcagacaggaaggccgggtgaagacagaagcagagaccgggggccaaggagtgcctggggttgcccagagccaccacgggctgcaagaggtgtgggacagactctctcagccacagaagggcccagccccgcacaggcctggatttcagagggcgaacatttctgtggccgaagctcccagtgcgtttgcagtccttggagacggccgcagacacatttgttcttggcctgtctccaggtctgtagcccccacagtgagcggccactggccggaggggaacaggaagagctggaggggacgtcacacacatgagccttttaggaataacgagtgacacgtgcaagaccccaaaccaaacaccatgtaacctgacacccagggagggagggagggaggggctgggaggggctcacctgtagggaggggctcacctgtacagcggtgctgggaagctggcctcgagggtccccgaggggatacagggccgtgcagcctcttgcctgagggtttgcatgtctgcctggatcccccgggctcctgccagaaggcctctgaggccaccgttgacagcataaaggccacccagtgtctcggcaaccacgctgaccactccctcctcccagctgcggggtgaggtggcctcgagggaagggctggagagtcgttctgagtatttaacaactgggggtgacacagtgtgggtgggcaaggccagggccactgccaggtggggtccgtggccctgagcccccagctctatgcaccccccacctggggtctggcttctccatctccacacccccttgaggggcttctgtctccccctgccccttcgatcgcaggaggcagtgcctggccggggtcgcaggcacctgtcaccccagctcctcactcctcacccactcacatccagtccgtttgtaaaatacacccaggatgagacctgcacgcaagtggctcacagcagcacgatttgtgacagcccgaggcggagaacaccgaacacccagtgaaggtgaggggatcagcacggcgcggccacccacgcacccacgcgctggaatgagactcagccacaaggaggtgcgaagctctgacccaggccacagtgcggatgcaccttgaggatgtcacgctcagtgagagacaccagacacagaagggtacgctgtgatcccacttctatgaaatgtccaggacagaccaatccacagaatcagggagaggattcgtgggtgccgggactggggagggggacctgggggtgactaggtgacataatggggacagggctgccttctgggtgatgagaatgttctggaatcagatgggatggctgcacggcgtggtgaaggtactgaacgccacctcactgtaagacggtagattttgtattttaccacaataaacaaaacaaaacaaaaccaaaaaaaaaaaaaaaaaa

SEQ ID NO: 2347 - protein, 143 aa, Homo sapien
MVLADAAKMRSPRVRMAPNPVPGTLIRRGKLGRRQEGRVKTEAETGGQGVPGVAQSHHGLQEVWDRLSQPQKGPAPHRPGFQRANISVAEAPSAFAVLGDGRRHICSWPVSRSVAPTVSGHWPEGNRKSWRGRHTHEPFRNNE

SEQ ID NO: 2348 - DNA, 2891 bp, Homo sapien
ttttcagagactcgcctggcagaggcctggagcgtcctgctgcgtggactgtgggcaccgagccaccaggaggttgttgatctcattcttgctcactggtccctgccagactggtggtgcctctctactgtcgggcagccccacctctgtgctgccccatccacctacagccctcatgcctgggcccagctggaggttctgacaggggccccctggggtggcatgcggacccttcagggtgccccaggcgcagcacaggtctccagagacacaggcaccagggcgttcagagctagtcccctcgctgctgttgactgtccttgagcagccccagggccggtttctcaacctcatttgctcacctgagcaatgaagtgaggtgggctcctggaactgcagcagccaccccccggggccatcgtgaggctaagaatccagtgcagggtgagcaaccagcgaccgctacaaggacagtgaagagctagcaccaggaccttgggtagcccacccgctggagggagcgtgtgctgcaaaaagcaagagtgggctttggaggccaacggatggagcggattcagtctgaggctgttccagcccttgcttaggatccacctacctaggtctggaaatcgtatttccacttcagatgccttctcagaggataaaataacccccggtgggggagagtactggaagagggctaattcccctggttttctccccatgagcattagtgtcagtgtaattttagagtgaccccagctatgtcacgtgtggcaggcacaagaacagatgtcaatgagctattgcagaggtggacacccagatgtgtgcgctggcacactggaggggcccgtagggtggctctagaccgccccctcgtgacggcttgcctaccacctgcaggcgacgttgtggacgtttaccagcgggagttcctggcgctgcgcgatcggttgcacgcagctgagcaggagagcctcaagcgctccaaggagctcaacctggtgctggacgagatcaagagggccgtgtcagaaaggcaggcgctgcgagacggagacggcaatcgcacctggggccgcctaacagaggacccccgattgaagccgtggaacggctcacaccggcacgtgctgcacctgcccaccgtcttccatcacctgccacacctgctggccaaggagagcagtctgcagcccgcggtgcgcgtgggccagggccgcaccggagtgtcggtggtgatgggcatcccgagcgtgcggcgcgaggtgcactcgtacctgactgacactctgcactcgctcatctccgagctgagcccgcaggagaaggaggactcggtcatcgtggtgctgatcgccgagactgactcacagtacacttcggcagtgacagagaacatcaaggccttgttccccacggagatccattctgggctcctggaggtcatctcaccctccccccacttctaccctgacttctcccgcctccgagagtcctttggggaccccaaggagagagtcaggtggaggaccaaacagaacctcgattactgcttcctcatgatgtacgcgcagtccaaaggcatctactacgtgcagctggaggatgacatcgtggccaagcccaactacctgagcaccatgaagaactttgcactgcagcagccttcagaggactggatgatcctggagttctcccagctgggcttcattggtaagatgttcaagtcgctggacctgagcctgattgtagagttcattctcatgttctaccgggacaagcccatcgactggctcctggaccatattctgtgggtgaaagtctgcaaccccgagaaggatgcgaagcactgtgaccggcagaaagccaacctgcggatccgcttcaaaccgtccctcttccagcacgtgggcactcactcctcgctggctggcaagatccagaaactgaaggacaaagactttggaaagcaggcgctgcggaaggagcatgtgaacccgccagcagaggtgagcacgagcctgaagacataccagcacttcaccctggagaaagcctacctgcgcgaggacttcttctgggccttcacccctgccgcgggggacttcatccgcttccgcttcttccaacctctaagactggagcggttcttcttccgcagtgggaacatcgagcacccggaggacaagctcttcaacacgtctgtggaggtgctgcccttcgacaaccctcagtcagacaaggaggccctgcaggagggccgcaccgccaccctccggtaccctcggagccccgacggctacctccagatcggctccttctacaagggagtggcagagggagaggtggacccagccttcggccctctggaagcactgcgcctctcgatccagacggactcccctgtgtgggtgattctgagcgagatcttcctgaaaaaggccgactaagctgcgggcttctgagggtaccctgtggccagccctgaagcccacatttctgggggtgtcgtcactgccgtccccggagggccagatacggccccgcccaaagggttctgcctggcgtcgggcttgggccggcctggggtccgccgctggcccggaggccctaggagctggtgctgcccccgcccgccgggccgcggaggaggcaggcggcccccacactgtgcctgaggcccggaaccgttcgcacccggcctgccccagtcaggccgttttagaagagcttttacttgggcgcccgccgtctctggcgcgaacactggaatgcatatactactttatgtgctgtgttttttattcttggatacatttgattttttcacgtaagtccacatatacttctataagagcgtgacttgtaataaagggttaatgaag

SEQ ID NO: 2349 - protein, 563 aa, Homo sapien
MSRVAGTRTDVNELLQRWTPRCVRWHTGGARRVALDRPLVTACLPPAGDVVDVYQREFLALRDRLHAAEQESLKRSKELNLVLDEIKRAVSERQALRDGDGNRTWGRLTEDPRLKPWNGSHRHVLHLPTVFHHLPHLLAKESSLQPAVRVGQGRTGVSVVMGIPSVRREVHSYLTDTLHSLISELSPQEKEDSVIVVLIAETDSQYTSAVTENIKALFPTEIHSGLLEVISPSPHFYPDFSRLRESFGDPKERVRWRTKQNLDYCFLMMYAQSKGIYYVQLEDDIVAKPNYLSTMKNFALQQPSEDWMILEFSQLGFIGKMFKSLDLSLIVEFILMFYRDKPIDWLLDHILWVKVCNPEKDAKHCDRQKANLRIRFKPSLFQHVGTHSSLAGKIQKLKDKDFGKQALRKEHVNPPAEVSTSLKTYQHFTLEKAYLREDFFWAFTPAAGDFIRFRFFQPLRLERFFFRSGNIEHPEDKLFNTSVEVLPFDNPQSDKEALQEGRTATLRYPRSPDGYLQIGSFYKGVAEGEVDPAFGPLEALRLSIQTDSPVWVILSEIFLKKAD

SEQ ID NO: 2350 - DNA, 2485 bp, Homo sapien
ggcaaatgggcttgggcggctcctcggcgggtggcggtggtggccgtagcggttcctcctggccctgttaatgtcggggccaggccgggggaggatggcgccctagaacccggccttgctggggtaggggcgggaggggacggggtggggaccggccatgtcggaggtgacccggagtctgctgcagcgctggggcgccagttttaggagaggcgccgacttcgactcttggggccagctggtggaggcgatagacgagtatcagatattagcaagacatctacaaaaggaggcccaagctcaacacaataattctgaattcacagaagaacaaaagaaaaccataggcaaaattgcaacatgcttggaattgcgaagtgcagctttacagtccacacagtctcaagaagaatttaaactggaggacctgaagaagctagaaccaatcctaaagaatattcttacatataataaagaattcccatttgatgttcagcctgtcccattaagaagaattttggcacctggtgaagaagagaatttgggatttgaagaagatgaagaagagggtggtgctggagcagggtctcctgattcttttcctgctagagttcccggtactttattaccaaggttgccatcggaaccaggaatgacattactcactatcagaattgagaaaattggtttgaaagatgctgggcagtgcatcgatccctatattacagttagtgtaaaggatctgaatggcatagacttaactcctgtgcaagatactcctgtggcttcaagaaaagaagatacatatgttcattttaatgtggacattgagctccagaagcatgttgaaaaattaaccaaaggtgcagctatcttctttgaattcaaacactacaagcctaaaaaaaggtttaccagcaccaagtgttttgctttcatggagatggatgaaattaaacctgggccaattgtaatagaactatacaagaaacccactgactttaaaagaaagaaattgcaattattgaccaagaaaccactttatcttcatctacatcaaactttgcacaaggaatgatcctgacatgatgaacctggaacttctgtgaattttaccactcagtagaaaccatcatagctctgtgtagcatattcacccttcaacaggcaggaagcaagccgtacccagaccagtaggccggacggagtccaatgcaaagctgtaccacagaattcagagtccagcacatcacactgacgtataggactccttgggatacaggtttattgtagattttgaaacatgtttttacttttctattaattgtgcaattaatagtctattttctaatttaccactactcctaccctgcttcctggaacaatactgttgtgggtaggatgtgctcatcttcagacttaatacagcaataagaatgtgctagagtttacacatctgttcacttttgctccaatatgctcttttgacttaacgtcaagctttgggttgatgtgggtagggtagtgtcaaactgctttgagaggaatgggaccagttctgctgcctaagaaggtctgtctggatgtttataggcagcacctctgaagtggcctaaattcaccctgatctgatagttttcctgcttagaaagtgtgccttggccagatcagtatcccacatgggagtgttccctaggttgtagctgtgattgtttccagatgaccagattgtttttctgaaaatgagcatatttttagtcatgtcgattagctgttcttctacatcacattgttactctttctgatgatgattctagggttaacattggaaccatctcaaaataattacaaagttttagatgggtttacaatgtcttctaaacaatgtaatctaaaaataattgagtcagatgctaacgagatactgcaggcataactgctgtttttctgacaactgattgtgaaaccttaaaacctgcatacctcttcttacagtgaggagtatgcaaaatctggaaagatattctattttttttatataggtagataggatcgccatttatttcctatttagatatactgacattcatccatatgaaaatatgcaggtcattagcttactataatttacttttgacttaatggggcataaataaaactttcatagtacacatgaggtggatatttgatacacagaacatttgcggtgggctttctgtgggttagatgtaaagcccacatattttaatattcactattttaaatgagcaatgcatgaggggaatgcagtgtcagtacctggcctatttttaaactagtgtaatcaccctagtcataccattcagtatgtttgctttttaaaataagtaaccacaattaagttgttgtagcccttgcacttcaagagatctagtctttactttcagttgtctgttaggtccattctgtttactagacggatgttaataaaaactatgcgagcctg

SEQ ID NO: 2351 - protein, 306 aa, Homo sapien
MSEVTRSLLQRWGASFRRGADFDSWGQLVEAIDEYQILARHLQKEAQAQHNNSEFTEEQKKTIGKIATCLELRSAALQSTQSQEEFKLEDLKKLEPILKNILTYNKEFPFDVQPVPLRRILAPGEEENLGFEEDEEEGGAGAGSPDSFPARVPGTLLPRLPSEPGMTLLTIRIEKIGLKDAGQCIDPYITVSVKDLNGIDLTPVQDTPVASRKEDTYVHFNVDIELQKHVEKLTKGAAIFFEFKHYKPKKRFTSTKCFAFMEMDEIKPGPIVIELYKKPTDFKRKKLQLLTKKPLYLHLHQTLHKE

SEQ ID NO: 2352 - DNA, 1954 bp, Homo sapien
ctcccggcctccctggtcccgcctgggaagggatgcaaggaagccctccggcgctgcgctccgaggcgggagacagcgtccccctccgcccctcgggtcctggcgcctcagagcccggcccaggccgcggaacggtgatgctcgggccggacgggcgggcgcggatccctgcgtcccgctgaaaatgtgtgtctgacatgcaagctcagtggggcagagacccgtggattgctgtgccctgccctccggacctggatcatgaaggtgttgggaagaagcttcttctgggtgctgtttcccgtccttccctgggcggtgcaggctgtggagcacgaggaggtggcgcagcgtgtgatcaaactgcaccgcgggcgaggggtggctgccatgcagagccggcagtgggtccgggacagctgcaggaagctctcagggcttctccgccagaagaatgcagttctgaacaaattgaaaactgcaattggagcagtggagaaagacgtgggcctgtcggatgaagagaaactgtttcaggtgcacacgtttgaaattttccagaaagagctgaatgaaagtgaaaattccgttttccaagctgtctacggactgcagagagccctgcagggggattacaaagatgtcgtgaacatgaaggagagcagccggcagcgcctggaggccctgagagaggctgcaataaaggaagaaacagaatatatggaacttctggcagcagaaaaacatcaagttgaagcccttaaaaatatgcaacatcaaaaccaaagtttatccatgcttgacgagattcttgaagatgtaagaaaggcagcggatcgtctggaggaagagatagaggaacatgcttttgacgacaataaatcagtcaagggggtcaattttgaggcagttctgagggtggaggaaggagaggccaattctaagcaaaatataacaaaacgagaagtggaggatgacttgggtcttagcatgctgattgactcccagaacaaccagtatattttgaccaagcccagagattcaaccatcccacgtgcagatcaccactttataaaggacattgttaccataggaatgctgtccttgccttgtggctggctatgtacagccataggattgcctacaatgtttggttatattatttgtggtgtacttctgggaccttcaggactaaatagtattaagtctattgtgcaagtggagacattaggagaatttggggtgttttttactctttttcttgttggtttagaattttctccagaaaagctaagaaaggtgtggaagatttccttacaagggccgtgttacatgacactgttaatgattgcatttggcttgctgtgggggcatctcttgcggatcaaacccacgcagagcgtcttcatttccacgtgtctgtccttgtcaagcacacccctcgtgtccaggttcctcatgggcagtgctcggggtgacaaagaaggcgacattgactacagcaccgtgctcctcggcatgctggtgacgcaggacgtgcagctcgggctcttcatggccgtcatgccgactctcatacaggcgggcgccagtacatcttctagcattgtcgtggaagttctccgaatcctggttttgattggtcagattcttttttcactagcggcggtttttcttttatgtcttgttataaagaagtatctcattggaccctattatcggaagctgcacatggaaagcaaggggaacaaagaaatcctgatcttgggaatatctgcctttatcttcttaatgttaacggtaattctcaaactatgtgttatttatgtaatctgatacataatctctttcactgaaatcttgtgatccattctttacctttccattttaataatggttaaaatatttgaaaaaaaaaaaaaaaaaaaaaaaaaaaaaaaaaaaaaaaaaaaaaaaa

SEQ ID NO: 2353 - protein, 524 aa, Homo sapien
MKVLGRSFFWVLFPVLPWAVQAVEHEEVAQRVIKLHRGRGVAAMQSRQWVRDSCRKLSGLLRQKNAVLNKLKTAIGAVEKDVGLSDEEKLFQVHTFEIFQKELNESENSVFQAVYGLQRALQGDYKDVVNMKESSRQRLEALREAAIKEETEYMELLAAEKHQVEALKNMQHQNQSLSMLDEILEDVRKAADRLEEEIEEHAFDDNKSVKGVNFEAVLRVEEGEANSKQNITKREVEDDLGLSMLIDSQNNQYILTKPRDSTIPRADHHFIKDIVTIGMLSLPCGWLCTAIGLPTMFGYIICGVLLGPSGLNSIKSIVQVETLGEFGVFFTLFLVGLEFSPEKLRKVWKISLQGPCYMTLLMIAFGLLWGHLLRIKPTQSVFISTCLSLSSTPLVSRFLMGSARGDKEGDIDYSTVLLGMLVTQDVQLGLFMAVMPTLIQAGASTSSSIVVEVLRILVLIGQILFSLAAVFLLCLVIKKYLIGPYYRKLHMESKGNKEILILGISAFIFLMLTVILKLCVIYVI

SEQ ID NO: 2354 - DNA, 4083 bp, Homo sapien
ctcctcctccgtctcctcctctctctctcatctgctgtggttatggcctgtcgctggagcacaaaagagtctccgcggtggaggtctgcgttgctcttgcttttcctcgctggggtgtacggaaatggtgctcttgcagaacattctgaaaatgtgcatatttcaggagtgtcaactgcttgtggagagactccagagcaaatacgagcaccaagtggcataatcacaagcccaggctggccttctgaatatcctgcaaaaatcaactgtagctggttcataagggcaaacccaggcgaaatcattactataagttttcaggattttgatattcaaggatccagaaggtgcaatttggactggttgacaatagaaacatacaagaatattgaaagttacagagcttgtggttccacaattccacctccgtatatctcttcacaagaccacatctggattaggtttcattcggatgacaacatctctagaaagggtttcagactggcatatttttcagggaaatctgaggaaccaaattgtgcttgtgatcagtttcgttgtggtaatggaaagtgtataccagaagcctggaaatgtaataacatggatgaatgtggagatagttccgatgaagagatctgtgccaaagaagcaaatcctccaactgctgctgcttttcaaccctgtgcttacaaccagttccagtgtttatcccgttttaccaaagtttacacttgcctccccgaatctttaaaatgtgatgggaacattgactgccttgacctaggagatgagatagactgtgatgtgccaacatgtgggcaatggctaaaatatttttatggtacttttaattctcccaattatccagacttttatcctcctggaagcaattgcacctggttaatagacactggtgatcaccgtaaagtcattttacgcttcactgactttaaacttgatggtactggttatggtgattatgtcaaaatatatgatggattagaggagaatccacacaagcttttgcgtgtgttgacagcttttgattctcatgcacctcttacagttgtttcttcttctggacagataagggtacatttttgtgctgataaagtgaatgctgcaaggggatttaatgctacttaccaagtagatgggttctgtttgccatgggaaataccctgtggaggtaactgggggtgttatactgagcagcagcgttgtgatgggtattggcattgcccaaatggaagggatgaaaccaattgtaccatgtgccagaaggaagaatttccatgttcccgaaatggtgtctgttatcctcgttctgatcgctgcaactaccagaatcattgcccaaatggctcagatgaaaaaaactgctttttttgccaaccaggaaatttccattgtaaaaacaatcgttgtgtgtttgaaagttgggtgtgtgattctcaagatgactgtggtgatggcagcgatgaagaaaattgcccagtaatcgtgcctacaagagtcatcactgctgccgtcatagggagcctcatctgtggcctgttactcgtcatagcattgggatgtacttgtaagctttattctctgagaatgtttgaaagaagatcatttgaaacacagttgtcaagagtggaagcagaattgttaagaagagaagctcctccctcgtatggacaattgattgctcagggtttaattccaccagttgaagattttcctgtttgttcacctaatcaggcttctgttttggaaaatctgaggctagcggtacgatctcagcttggatttacttcagtcaggcttcctatggcaggcagatcaagcaacatttggaaccgtatttttaattttgcaagatcacgtcattctgggtcattggctttggtctcagcagatggagatgaggttgtccctagtcagagtaccagtagagaacctgagagaaatcatactcacagaagtttgttttccgtggagtctgatgatacagacacagaaaatgagagaagagatatggcaggagcatctggtggggttgcagctcctttgcctcaaaaagtccctcccacaacggcagtagaagcgacagtaggagcatgtgcaagttcctcaactcagagtacccgaggtggtcatgcagataatggaagggatgtgacaagtgtggaacccccaagtgtgagtccagcacgtcaccagcttacaagtgcactcagtcgtatgactcaggggctacgctgggtacgttttacattaggacgatcaagttccctaagtcagaaccagagtcctttgagacaacttgataatggggtaagtggaagagaagatgatgatgatgttgaaatgctaattccaatttctgatggatcttcagactttgatgtgaatgactgctccagacctcttcttgatcttgcctcagatcaaggacaagggcttagacaaccatataatgcaacaaatcctggagtaaggccaagtaatcgagatggcccctgtgagcgctgtggtattgtccacactgcccagataccagacacttgcttagaagtaacactgaaaaacgaaacgagtgatgatgaggctttgttactttgttaggtacgaatcacataagggagattgtatacaagttggagcaatatccatttattattttgtaactttacagttaaactagttttagtttaaaaagaaaaaatgcagggtgatttcttattattatatgttagcctgcatggttaaattcgacaacttgtaactctatgaacttagagtttactattttagcagctaaaaatgcatcacatattcatattgttcaataatgtcctttcatttgtttctgattgttttcatcctgatactgtagttcactgtagaaatgtggctgctgaaactcatttgattgtcatttttatctatcctatgttaaatggtttgtttttacaaaataataccttattttaattgaaacgtttatgcttttgccaacacatcttgtaacttaatatactagatgttaaggttgttaatgtacaaaaaaaaaacccttatactcacctgcgttttcatttgtttgacatttgtctattattggatttcattatcatatgaacttgtcagtgggaaacaaactgtctaaaaatttttctcttacgtttaacatacaatcatgtgaaatttaggcagagttcgataaattactggcaaaaacaaaactcttttataaagattttctaatgttgactttaatactctaacatggtacaaaccaaatggtaaaatcccaagtcatttcttttttcatctctatttagcaacagaattaagtggatgaagatattctactatgcattaaatcttgaactttataaaacatgtacaaaaattgtacaagataagttccacctggtaatgtctttccctaatacagggttgcgcttgcattggaccctagggatttgcactaaaattatatcaaggtctcagatgagcttagtgcacaagcactatcactttaaatactattatttgctaccacagcaactatatatttccatagcttttggctgggggcgggggacatttttattacaacttgaaattgctttgctggtttcatatttatttgttgtatttaaaaaatacattgttgtaagagtgattttttcaatatattttattcctgggggggatcatgctacactctcaaaagaaaattaagaaatcattcagatcatcccccctttttaagtagtgtgaattgcaaaacccaacatattttttttactgtcagttgcggtttatttattctttaactgtctgttttagtagtttaatgattatgaaaaatgtatctgtgtgtgatttgctatttattaaattttaagtactttgctgaatgtcattttaaagcatgtttgaagtcttgtgtatttgtctgtgttaatgctgtcaggaggaactgactaagatgttttaatatgtatcaaaaattaaaatgattttttttattgccttgaggtactttttaaaaaaaaaaaaaaaaaaaaaaaaaaa

SEQ ID NO: 2355 - protein, 859 aa, Homo sapien; identical to SEQ ID NO: 1242

SEQ ID NO: 2356 - DNA, 1953 bp, Homo sapien
cgctcccacccgcccgtggcccgcgcccatggccgcgcgcgctccacacaactcaccggagtccgcgccctgcgccgccgaccagttcgcagctccgcgccacggcagccagtctcacctggcggcaccgcccgcccaccgccccggccacagcccctgcgcccacggcagcaatcgaggcgaccgcgacagtggtgggggacgctgctgagtggaagagagcgcagcccggccaccggacctacttactcgccttgctgattgtctatttttgcgtttacaacttttctaagaacttttgtatacaaaggaactttttaaaaaagacgcttccaagttatatttaatccaaagaagaaggatctcggccaatttggggttttgggttttggcttcgttttttctcttcgttgactttggggttcaggtgccccagctgcttcgggctgccgaggaccttctgggcccccacattaatgaggcagccacctggcgagtctgacatggctgtcagcgacgcgctgctcccatctttctccacgttcgcgtctggcccggcgggaagggagaagacactgcgtcaagcaggtgccccgaataaccgctggcgggaggagctctcccacatgaagcgacttcccccagtgcttcccggccgcccctatgacctggcggcggcgaccgtggccacagacctggagagcggcggagccggtgcggcttgcggcggtagcaacctggcgcccctacctcggagagagaccgaggagttcaacgatctcctggacctggactttattctctccaattcgctgacccatcctccggagtcagtggccgccaccgtgtcctcgtcagcgtcagcctcctcttcgtcgtcgccgtcgagcagcggccctgccagcgcgccctccacctgcagcttcacctatccgatccgggccgggaacgacccgggcgtggcgccgggcggcacgggcggaggcctcctctatggcagggagtccgctccccctccgacggctcccttcaacctggcggacatcaacgacgtgagcccctcgggcggcttcgtggccgagctcctgcggccagaattggacccggtgtacattccgccgcagcagccgcagccgccaggtggcgggctgatgggcaagttcgtgctgaaggcgtcgctgagcgcccctggcagcgagtacggcagcccgtcggtcatcagcgtcagcaaaggcagccctgacggcagccacccggtggtggtggcgccctacaacggcgggccgccgcgcacgtgccccaagatcaagcaggaggcggtctcttcgtgcacccacttgggcgctggaccccctctcagcaatggccaccggccggctgcacacaacttccccctggggcggcagctccccagcaggagtaccccgaccctgggttttgaggaagtgctgagcagcagggaatgtcaccctgccctgccgcttcctcccggcttccatccccacccggggcccaattacccatccttcctgcccgatcagatgcagccgcaagtcccgccgctccattaccaagagctcatgccacccggttcctgcatgccagaggagcccaagccaaagaggggaagacgatcgtggccccggaaaaggaccgccacccacacttgtgattacgcgggctgcggcaaaacctacacaaagagttcccatctcaaggcacacctgcgaacccacacaggtgagaaaccttaccactgtgactgggacggctgtggatggaaattcgcccgctcagatgaactgaccaggcactaccgtaaacacacggggcaccgcccgttccagtgccaaaaatgcgaccgagcattttccaggtcggaccacctcgccttacacatgaagaggcatttttaaatcccagacagtggatatgacccacactgccagaaga

SEQ ID NO: 2357 - protein, 470 aa, Homo sapien
MAVSDALLPSFSTFASGPAGREKTLRQAGAPNNRWREELSHMKRLPPVLPGRPYDLAAATVATDLESGGAGAACGGSNLAPLPRRETEEFNDLLDLDFILSNSLTHPPESVAATVSSSASASSSSSPSSSGPASAPSTCSFTYPIRAGNDPGVAPGGTGGGLLYGRESAPPPTAPFNLADINDVSPSGGFVAELLRPELDPVYIPPQQPQPPGGGLMGKFVLKASLSAPGSEYGSPSVISVSKGSPDGSHPVVVAPYNGGPPRTCPKIKQEAVSSCTHLGAGPPLSNGHRPAAHNFPLGRQLPSRSTPTLGFEEVLSSRECHPALPLPPGFHPHPGPNYPSFLPDQMQPQVPPLHYQELMPPGSCMPEEPKPKRGRRSWPRKRTATHTCDYAGCGKTYTKSSHLKAHLRTHTGEKPYHCDWDGCGWKFARSDELTRHYRKHTGHRPFQCQKCDRAFSRSDHLALHMKRHF

SEQ ID NO: 2358 - DNA, 2015 bp, Homo sapien
acaaataataaggaacaaggtgtggttattgattctctaaaattaagtgaggagatgaagcccaatctagatggtgttgatttattcaacaatggtggttctggaaacggtgaaacgaaaactgggctgagactgaaagcaataaatctgcctttggaaaatgaagtaactgaaatttcagctttgcaggtgcatttggatgaattccaaaaaatcttatggaaggaaagagaaatgcgcacagctttggaaaaagaaatagagagactggagtcggctttgtctctgtggaagtggaagtatgaagaactgaaagaatcaaagccaaaaaatgtgaaagagtttgacattcttcttggtcaacataatgatgaaatgcaagaactgtcaggcaatataaaggaagaatccaaatctcaaaacagcaaagacagagtgatttgtgagttaagagcagagctagagagattgcaagctgaaaatacctcggagtgggacaagagggaaatacttgaaagagaaaagcagggactggagagagaaaatagaaggctgaagatccaggtgaaagaaatggaagagcttttggataagaaaaatagattaagtgcaaactctcaaagtcctgatttcaagatgtcacaaattgatctgcaagaaaaaaaccaggaattactgaaccttcaacatgcctactataaactaaacagacaataccaggcaaatattgcagaactgactcatgcaaacaaccgagtggatcaaaatgaagcagaagtaaagaaactaagattacgagtggaagaactaaagcagggactcaaccaaaaagaagatgagcttgatgattccctgaatcagatccgtaagctccagaggtctctggatgaagagaaagaaagaaatgaaaacttagagactgaactcaggcacttgcaaaactggtaattttttcacaaaatatgctgaattaaagattagggccttaaagacatttccatatccttttcttaaatatcagtaaaattgtttttattaactagaaatattaatgaaaaaaacgtagacaatacacaaattaatgggcttcttcacttcttctaatttttgcctaacagatactgcatattctcaaaaagacaatttaaatgtcatttaaaaacaactttaattctaagatgtgtaaatattttgaaagtcaaaaagggctttcagaatactttttacataaaatctgaaagagttataatatcggtaagaaaaagtaagttgaaaaccatacaagacgctgggtcattaataagaaaaccattgactttaagtataaagtactggtttgtttaaataattggtaaacttttatgtacgtgttgtctatgtggtggggatggcaggttgtattaacaaaaatgaatcattctagaggtgtaacaatacatttcttatataattttataagtcatttctaatctttgtataaaacagaagtgagcaagatgaatcagaaaaaaggtgttttgtattttaaaggtaacagataaccaggtgattgaatctaagacaggctgtaagcatcgctgagaaactaaaaggacttttgacttttatctggatagacatttctacagtaaaatcatggaaaggcatcagcattgcaaagtagcatctaggtagaaatcaggccaaaattaagctgtggtttccctctgagtagtgggaatagagaaaattaggaaattgtggttatgtgaatatttctttaaaacttttatgtacattatagtttattgcttcatatttaagtttagtttttaaggtaaaatgttattttgaacaaaaagacacttataattttccatacctattttcaactgaaggcaacttgtaagatttaactcagtcaataacatactggttttactcatctccccctccattgattagccaaaaaaaaatgaaatcttactaattcattattgaataaagaccacttttatcagagtcaaaaaaaaaaa

SEQ ID NO: 2359 - protein, 297 aa, Homo sapien
MKPNLDGVDLFNNGGSGNGETKTGLRLKAINLPLENEVTEISALQVHLDEFQKILWKEREMRTALEKEIERLESALSLWKWKYEELKESKPKNVKEFDILLGQHNDEMQELSGNIKEESKSQNSKDRVICELRAELERLQAENTSEWDKREILEREKQGLERENRRLKIQVKEMEELLDKKNRLSANSQSPDFKMSQIDLQEKNQELLNLQHAYYKLNRQYQANIAELTHANNRVDQNEAEVKKLRLRVEELKQGLNQKEDELDDSLNQIRKLQRSLDEEKERNENLETELRHLQNW

SEQ ID NO: 2360 - DNA, 2440 bp, Homo sapien
cggccttgtcagctcacagcaggcgttaacagcctctaattgaggaaactgtggctggacaggttgcaaggcagttctgctccccatcgtcctcttgctgactggggactgctgagcccgtgcacggcagagagtctggtggggtggaggggctggcctggcccctctgtcctgtggaaatgctggggcaagtggtcaccctcatactcctcctgctcctcaaggtgtatcagggcaaaggatgccagggatcagctgaccatgtggttagcatctcgggagtgcctcttcagttacaaccaaacagcatacagacgaaggttgacagcattgcatggaagaagttgctgccctcacaaaatggatttcatcacatattgaagtgggagaatggctctttgccttccaatacttccaatgatagattcagttttatagtcaagaacttgagtcttctcatcaaggcagctcagcagcaggacagtggcctctactgcctggaggtcaccagtatatctggaaaagttcagacagccacgttccaggtttttgtatttgataaagttgagaaaccccgcctacaggggcaggggaagatcctggacagagggagatgccaagtggctctgtcttgcttggtctccagggatggcaatgtgtcctatgcttggtacagagggagcaagctgatccagacagcagggaacctcacctacctggacgaggaggttgacattaatggcactcacacatatacctgcaatgtcagcaatcctgttagctgggaaagccacaccctgaatctcactcaggactgtcagaatgcccatcaggaattcagattttggccgtttttggtgatcatcgtgattctaagcgcactgttccttggcacccttgcctgcttctgtgtgtggaggagaaagaggaaggagaagcagtcagagaccagtcccaaggaatttttgacaatttacgaagatgtcaaggatctgaaaaccaggagaaatcacgagcaggagcagacttttcctggaggggggagcaccatctactctatgatccagtcccagtcttctgctcccacgtcacaagaacctgcatatacattatattcattaattcagccttccaggaagtctggatccaggaagaggaaccacagcccttccttcaatagcactatctatgaagtgattggaaagagtcaacctaaagcccagaaccctgctcgattgagccgcaaagagctggagaactttgatgtttattcctagttgctgcagcaattctcacctttcttgcacatcagcatctgctttgggaattggcacagtggatgacggcacaggagtctctatagaacacttcctagtctggagaggatatggaaatttgttcttgttctatattttgttttgaaaatgatgtctaacaaccatgataagagcaaggctgttaaataatatcttccaatttacagatcagacatgaatgggtggaggggttaggttgttcacaaaaggccacattccaagtatttgtaatctagaaagtgttatgtaagtgatgttattagcatcgagattccctccacctgattttcaagctgtcacttgtttccttttctcccctctctgggttgactgcatttctagactctcgccggcccaggcccatcttccaaagcaagaggaaggaatgataatggtgactcaggggaagaagaaacagccctcctctgaaagcctggactgtccggctgtgaactggctggcaggttctgcacgtgggtgggggccagggcctgggctttactcaattgcagagaaaaaactttctccctgcatctcatacctttacctctggccagttggccaccagggggagtgggctgaagggagagtagatggtgcaaagcaagcccatctctgagtagaaaaatcacccagagcacatgctgacctgataactggggtgttgagaccagctttgtccatggtatgatgtttgatttatgaagacgcattgttagaaatccatttggcttcttcatagaagtggcttcccagaggaagaggcctctcagaaaccatgttctatttaagttctgagtcctgatgagtgttccccaggatgcacattgaagggagggctcaggcagctgagggctgagaatgaggcagttggaatctagacactatgctgggttccctgagtcgtcaggccagacatttcaacaaggctgtggggagcagggctgtgactctggctgagcccaggaaagcgacaagggtgaactgggagaggacttactcagagaccccaacaggtgatactgcacaaagcctggttcttcaattttcctaccctgtatctaacataggagtttcatataaaacggtgatatcatgcagatgcagtctgaattccttgcctg

SEQ ID NO: 2361 - protein, 365 aa, Homo sapien
MLGQVVTLILLLLLKVYQGKGCQGSADHVVSISGVPLQLQPNSIQTKVDSIAWKKLLPSQNGFHHILKWENGSLPSNTSNDRFSFIVKNLSLLIKAAQQQDSGLYCLEVTSISGKVQTATFQVFVFDKVEKPRLQGQGKILDRGRCQVALSCLVSRDGNVSYAWYRGSKLIQTAGNLTYLDEEVDINGTHTYTCNVSNPVSWESHTLNLTQDCQNAHQEFRFWPFLVIIVILSALFLGTLACFCVWRRKRKEKQSETSPKEFLTIYEDVKDLKTRRNHEQEQTFPGGGSTIYSMIQSQSSAPTSQEPAYTLYSLIQPSRKSGSRKRNHSPSFNSTIYEVIGKSQPKAQNPARLSRKELENFDVYS

SEQ ID NO: 2362 - DNA, 2398 bp, Homo sapien
agcttaacaagaccatggcctctggacccgcgatcagctcgctgtgtggtcctgagcagccacccaacatctctgggccttggattcctacctggcctttcttctggatgcatcatttttgcctttaggtatctggaccattcccccccatggatgataaagtctttgcttcacaccctcaggattaccttaaaggcctgaaaagaacagaggaggagtctgaggaggtgaattccagccgtgctcttgcaggctggctgggcagtgtgctggggaggagagggagcctctggctgggcctcctccaccgggcctggtgtgctgggaacaccccgcattgtcccaaggcctcagatttgactttcaaagggaaaacagctctcctgataaaggacaccattggagaaactgggcatttcaccaaggatttgactggaatggcatgcttcctttaaagatgaaagttgacttttagagccaattaaagccctttggggaatctggcctcataccttgtccacacagagttcctgtacaaggttcctgacctgtgggaagcggcacagcaccagctaggcagagacgccccaggccatgttagagctttgagtgaggcctggtaacagggaggcgctgtcacctactggccttgccaatccagctccaagatgctgagcctgaagctccccaggctgtttagcatagaccagataccccaggtgttccatgagcaaggcatcctgttcggctaccgccatccacagagttctgccactgcctgcatcctcagccttttccaaatgaccaatgagactctcaacatttggactcacttgctgcccttctggttctttgcatggaggtttgtgactgcactgtatatgacagacatcaagaatgacagctactcctggcccatgcttgtgtacatgtgcaccagctgcgtgtacccacttgtgtccagctgtgcgcacaccttcagctctatgtccaagaatgcccggcacatttgctacttcctggactatggtgccgtcaacctcttcagcctgggctcagccattgcctactctgcatacacgttcccggatgcgctcatgtgcaccactttccatgactactacgtggccctggctgtactgaacaccatcctcagcacaggcctctcctgctactccaggtttcttgaagtccagaagcccagactctgtaaggtgattcgtgtcctcgcctttgcttatccgtacacctgggactccctccccatcttctacaggctattcctgttcccaggggagagtgcacaaaatgaagccacctcgtaccaccagaagcacatgatcatgaccctcctggcctctttcttgtactctgcacatctgccagaacgcctagcccctggacgctttgactacatcggtcacagtcaccagctgtttcacgtgtgtgtgatcctggccacgcacatgcagatggaagccatacttctggacaagactctgaggaaggaatggctcctggccacctccaagcccttctctttctctcagatagctggagccatacttctgtgcatcatcttcagcctcagcaacataatttatttctcagctgctctgtatcggattcccaagccagaattacataaaaaagaaacatgactcagaccataagcttttcatgccagatgtcaacattaagctgcaacatcctaaccaccataagccggaggtggttacagcttatcacggcctaaaatattcataatggttggtgtcttttgaatgaattcatgtcaaaaatgttattcagctggggaaatttctctaaatgtacactgattctgtgtgtgtgattttaaaaggagaacatggttcaagcaagtccttgttaaggcaaactattgatatttcattaattttaaatttacttaaaatgtggttttaaattctatttaaacatttggattaagcatattactctggagctttgtattattctttaaaaatgaatcttgcttcatttgatgaatttcatgtcacaaagcttctctcaagagctctcgtagtggcctgtcaaccactttcggagaatgagccaggtcagtcactgggaggacctgtgaaagaaagttggtcactgagtgccttggggactggcaaaacattccagaatgaagagagctgtctggggagagcccttcttcccttctccacctagtgaagggagaacagaaggggagtcctctcttcccacaagtccattctgccttcaaagtgtaagttctcatgtcattatggatttggagtttgtcagtttttttcttaaaagtccacagcggggaaaaaaaaaaaaaaaaaaaaaaaaaaaaaaaaaaaaaaaaaaaaaaaaaaaaaaa

SEQ ID NO: 2363 - protein, 330 aa, Homo sapien
MLSLKLPRLFSIDQIPQVFHEQGILFGYRHPQSSATACILSLFQMTNETLNIWTHLLPFWFFAWRFVTALYMTDIKNDSYSWPMLVYMCTSCVYPLVSSCAHTFSSMSKNARHICYFLDYGAVNLFSLGSAIAYSAYTFPDALMCTTFHDYYVALAVLNTILSTGLSCYSRFLEVQKPRLCKVIRVLAFAYPYTWDSLPIFYRLFLFPGESAQNEATSYHQKHMIMTLLASFLYSAHLPERLAPGRFDYIGHSHQLFHVCVILATHMQMEAILLDKTLRKEWLLATSKPFSFSQIAGAILLCIIFSLSNIIYFSAALYRIPKPELHKKET

SEQ ID NO: 2364 - DNA, 5539 bp, Homo sapien
ggagggaggccgggcaggcggctgagcggcgcggctctcaacgtgacggggaagtggttcgggcggccgcggcttactaccccagggcgaacggacggacgacggaggcgggagccggtagccgagccgggcgacctagagaacgagcgggtcaggctcagcgtcggccactctgtcggtccgctgaatgaagtgcccgcccctctaagcccggagcccggcgctttccccgcaagatggacggtttcgccggcagtctcgatgatagtatttctgctgcaagtacttctgatgttcaagatcgcctgtcagctcttgagtcacgagttcagcaacaagaagatgaaatcactgtgctaaaggcggctttggctgatgttttgaggcgtcttgcaatctctgaagatcatgtggcctcagtgaaaaaatcagtctcaagtaaaggccaaccaagccctcgagcagttattcccatgtcctgtataaccaatggaagtggtgcaaacagaaaaccaagtcataccagtgctgtctcaattgcaggaaaagaaactctttcatctgctgctaaaagtggtacagaaaaaaagaaagaaaaaccacaaggacagagagaaaaaaaagaggaatctcattctaatgatcaaagtccacaaattcgagcatcaccttctccccagccctcttcacaacctctccaaatacacagacaaactccagaaagcaagaatgctactcccaccaaaagcataaaacgaccatcaccagctgaaaagtcacataattcttgggaaaattcagatgatagccgtaataaattgtcgaaaataccttcaacacccaaattaataccaaaagttaccaaaactgcagacaagcataaagatgtcatcatcaaccaagaaggagaatatattaaaatgtttatgcgcggtcggccaattaccatgttcattccttccgatgttgacaactatgatgacatcagaacggaactgcctcctgagaagctcaaactggagtgggcatatggttatcgaggaaaggactgtagagctaatgtttaccttcttccgaccggggaaatagtttatttcattgcatcagtagtagtactatttaattatgaggagagaactcagcgacactacctgggccatacagactgtgtgaaatgccttgctatacatcctgacaaaattaggattgcaactggacagatagctggcgtggataaagatggaaggcctctacaaccccacgtcagagtgtgggattctgttactctatccacactgcagattattggacttggcacttttgagcgtggagtaggatgcctggatttttcaaaagcagattcaggtgttcatttatgtgttattgatgactccaatgagcatatgcttactgtatgggactggcagaagaaagcaaaaggagcagaaataaagacaacaaatgaagttgttttggctgtggagtttcacccaacagatgcaaataccataattacatgcggtaaatctcatattttcttctggacctggagcggcaattcactaacaagaaaacagggaatttttgggaaatatgaaaagccaaaatttgtgcagtgtttagcattcttggggaatggagatgttcttactggagactcaggtggagtcatgcttatatggagcaaaactactgtagagcccacacctgggaaaggacctaaaggtgtatatcaaatcagcaaacaaatcaaagctcatgatggcagtgtgttcacactttgtcagatgagaaatgggatgttattaactggaggagggaaagacagaaaaataattctgtgggatcatgatctgaatcctgaaagagaaatagaggttcctgatcagtatggcacaatcagagctgtagcagaaggaaaggcagatcaatttttagtaggcacatcacgaaactttattttacgaggaacatttaatgatggcttccaaatagaagtacagggtcatacagatgagctttggggtcttgccacacatcccttcaaagatttgctcttgacatgtgctcaggacaggcaggtgtgcctgtggaactcaatggaacacaggctggaatggaccaggctggtagatgaaccaggacactgtgcagattttcatccaagtggcacagtggtggccataggaacgcactcaggcaggtggtttgttctggatgcagaaaccagagatctagtttctatccacacagacgggaatgaacagctctctgtgatgcgctactcaatagatggtaccttcctggctgtaggatctcatgacaactttatttacctctatgtagtctctgaaaatggaagaaaatatagcagatatggaaggtgcactggacattccagctacatcacacaccttgactggtccccagacaacaagtatataatgtctaactcgggagactatgaaatattgtactgggacattccaaatggctgcaaactaatcaggaatcgatcggattgtaaggacattgattggacgacatatacctgtgtgctaggatttcaagtatttggtgtctggccagaaggatctgatgggacagatatcaatgcactggtgcgatcccacaatagaaaggtgatagctgttgccgatgacttttgtaaagtccatctgtttcagtatccctgctccaaagcaaaggctcccagtcacaagtacagtgcccacagcagccatgtcaccaatgtcagttttactcacaatgacagtcacctgatatcaactggtggaaaagacatgagcatcattcagtggaaacttgtggaaaagttatctttgcctcagaatgagactgtagcggatactactctaaccaaagcccccgtctcttccactgaaagtgtcatccaatctaatactcccacaccgcctccttctcagcccttaaatgagacagctgaagaggaaagtagaataagcagttctcccacacttctggagaacagcctggaacaaactgtggagccaagtgaagaccacagcgaggaggagagtgaagagggcagcggagaccttggtgagcctctttatgaagagccatgcaacgagataagcaaggagcaggccaaagccacccttctggaggaccagcaagacccttcgccctcgtcctaacaccctggcttcagtgcaactcttttccttcagctgcatgtgattttgtgataaagttcaggtaacaggatgggcagtgatggagaatcactgttgattgagattttggtttccatgtgatttgttttcttcaatagtcttattttcagtctctcaaatacagccaacttaaagttttagtttggtgtttattgaaaattaaccaaacttaatactaggagaagactgaatcattaatgatgtctcacaaattactgtgtacctaagtggtgtgatgtaaatactggaaacaaaaacagcagttgcattgattttgaaaacaaacccccttgttatctgaacatgttttcttcaggaacaaccagaggtatcacaaacactgttactcatctactggctcagactgtactacttttttttttttttttcctgaaaaagaaaccagaaaaaaatgtactcttactgagataccctctcaccccaaatgtgtaatggaaaatttttaattaagaaaaacttcagttttgccaagtgcaatggtgttgccttctttaaaaaatgccgttttcttacactaccagtggatgtccagacatgctcttagtctactagagaggtgctgccttttctaagtcataatgaggaacagtcccttaatttcttgtgtgcaactctgttttatcctagaactaagagagcattggtttgttaaagagctttcaatgtatattaaaaccttcaatactcagaaatgatggattcctccaaggagtcctttactagcctaaacattctcaaatgtttgagattcaagtgaatggaaggaaaaccacatgcctttaaaactaaactgtaataattacctggctaatttcagctaagccttcatcataatttgttccctcagtaataggagaaatataaatacagtaagtttagattattgaattggtgcttgaaatttattggttttgttgtaattttatacagattatatgagggataagatactcatcaaattgcaaattcttttttttacagaagtgtgggtaacagtcacagcagttttttttaccaacagcatacttaacagacttgctgtgtagcagtttttttctggtggagttgctgtaagtcttgtaagtctaatgtggctatcctactcttttgggcaatgcatgtattatgcattggaaaggtattttttttaagttctgttggctagctatggttttcagtacatttcctactttaagagtaattactgacaaatatgtatttcctatatgtttatactttgattataaaaaagtattttgttttgattttttaacttgctgcattgttttgatactttctatttttttggtcaaatcatgtttagaaactttggatgagttaagaagtcttaagtatgcaggcgtttacgtgattgtgccattccaaagtgcatcagaactgtcattcccttctaatatcttctcaggagtaatacaaatcaggtatttcatcatcatttggtaatatgaaaactccagtgaactcccaaggacatttacaacatttatattcacacgctgtatggaagggtgtgggtgtgtgtgaaggggcgagtggagacactgtgtgtatctctagataagaagatatgcaccacgttgaaaatactcagtgtagatctctatgtgtataggtatctgtatatctttccttttgtttacaactgttaaaaaacctcaaaatagttctcttcaaaagaagagagattccaagcaacccatctttcttcagtatgtatgttctgtacatacttatcggagcgcgccagtaagtatcaggcatatatatctgtctgttagcaatgattattacatcatcagatcagcatgtgctatactccctgcaagaaatatactgacatgaacaggcagttcttggagaagaaagagcatttctttaagtacctggggaatacagctctcagtgatcagcagggagtttatttgaggacatcagtcacctttggggttgccatgtacaatgagatttataatcatgatactcttcggtggtagtttcaaaagacactactaatacgcaggaagcgttccagctatttaatgctggcaactactgtttaatggtcagttaaatctgtgataatggttggaagtgggtggggttatgaaattgtagatgtttttagaaaaacttgtgaatgaaaatgaatccaagtgtttcatgtgaagatgttgagccattgctatcatgcattcctgtctcatggcagaaaattttgaagattaaaaaataaaataatcaaaatgtttcctctttctaaaaaaaaaaaaaaaaaa

SEQ ID NO: 2365 - protein, 981 aa, Homo sapien
MDGFAGSLDDSISAASTSDVQDRLSALESRVQQQEDEITVLKAALADVLRRLAISEDHVASVKKSVSSKGQPSPRAVIPMSCITNGSGANRKPSHTSAVSIAGKETLSSAAKSGTEKKKEKPQGQREKKEESHSNDQSPQIRASPSPQPSSQPLQIHRQTPESKNATPTKSIKRPSPAEKSHNSWENSDDSRNKLSKIPSTPKLIPKVTKTADKHKDVIINQEGEYIKMFMRGRPITMFIPSDVDNYDDIRTELPPEKLKLEWAYGYRGKDCRANVYLLPTGEIVYFIASVVVLFNYEERTQRHYLGHTDCVKCLAIHPDKIRIATGQIAGVDKDGRPLQPHVRVWDSVTLSTLQIIGLGTFERGVGCLDFSKADSGVHLCVIDDSNEHMLTVWDWQKKAKGAEIKTTNEVVLAVEFHPTDANTIITCGKSHIFFWTWSGNSLTRKQGIFGKYEKPKFVQCLAFLGNGDVLTGDSGGVMLIWSKTTVEPTPGKGPKGVYQISKQIKAHDGSVFTLCQMRNGMLLTGGGKDRKIILWDHDLNPEREIEVPDQYGTIRAVAEGKADQFLVGTSRNFILRGTFNDGFQIEVQGHTDELWGLATHPFKDLLLTCAQDRQVCLWNSMEHRLEWTRLVDEPGHCADFHPSGTVVAIGTHSGRWFVLDAETRDLVSIHTDGNEQLSVMRYSIDGTFLAVGSHDNFIYLYVVSENGRKYSRYGRCTGHSSYITHLDWSPDNKYIMSNSGDYEILYWDIPNGCKLIRNRSDCKDIDWTTYTCVLGFQVFGVWPEGSDGTDINALVRSHNRKVIAVADDFCKVHLFQYPCSKAKAPSHKYSAHSSHVTNVSFTHNDSHLISTGGKDMSIIQWKLVEKLSLPQNETVADTTLTKAPVSSTESVIQSNTPTPPPSQPLNETAEEESRISSSPTLLENSLEQTVEPSEDHSEEESEEGSGDLGEPLYEEPCNEISKEQAKATLLEDQQDPSPSS

SEQ ID NO: 2366 - DNA, 834 bp, Homo sapien
cgcctccgaggcagtgtgtttccgcccagagctggagtctcccagctgccagccgaccccgaacccgcactcccgccaaccgcgctttttgtgggcggtcggaaaccacagcctccgttggatatgttcggtgcatgttataaacaaccacttaaaccctccggatctgagcctcccgcagaggaatgcagaatgacgccacggcacgcaggatgtgatgtcaccgagatgcagaggatactcagtcaaccaacatttactgagcatctacttcgtgccgtcttgtcaacggaaaggggtccctatccagaccccaagagagcattcttggatctcttgcaagaaagaatttgaggcgaatccatagagtaagcaaggcaagttacttctatatagaagggtgcacccttacagatcaaacaatgcttagtgatgtgtgtcagacctctgagcccaagcaaagccatcatatcccctgtgacctgcatgtatacatccagatggcctgaagcaagtgaagaatcacaaaagaagtgaaaagggccggttcctgccttaactgatgacattccaccattgtgatttgttcctgccccaccttaactgagcgattaacctgtgaacttccttctcctggctcagaagcttccccactgagcaccttgtgacccccgcccctgcctgccatagaacaaccccctttgattgtaattttcctttacctacccaaatcctataaaacggccccacccctatctcccttcgctgacactctctttggactcagcctgcctgcacctaggtgattaaaaagctttattgtcacgcaaaaaa

SEQ ID NO: 2367 - protein, 76 aa, Homo sapien
MFGACYKQPLKPSGSEPPAEECRMTPRHAGCDVTEMQRILSQPTFTEHLLRAVLSTERGPYPDPKRAFLDLLQERI

SEQ ID NO: 2368 - DNA, 1762 bp, Homo sapien
gcgccctcgccgcggacaccggagctgcggccgctccccgctgtcccccagagatggcagatcctgaggtagttgtgtgtagctgcagctctcatgaagaggaaaatcgctgcaattttaaccagcaaacatctccatctgaggagcttctattagaagaccagatgaggcgaaaactcaaattttttttcatgaatccctgtgagaagttctgggctcgaggtagaaaaccatggaaacttgccatacaaattctaaaaattgcaatggtgactatccagtacttgcagctatacaatgtctccgttgggaatcatgcttatgagaacaaaggtaccaagcaatctgctatggcaatctgtcagcacttctacaagcgaggaaacatctaccctggaaatgatacctttgacatcgatccagaaattgaaactgagtgtttctttgtggagccagatgaaccttttcacattgggacaccagcagaaaataaactgaacttaacactggacttccacagactcctaacagtggagcttcagtttaaactgaaagccattaatctgcagacagttcgtcatcaagaactccctgactgttatgactttactctgactataacatttgacaacaaggcccatagtggaagaattaaaataagtttagataatgacatttccatcagagaatgtaaagactggcatgtatctggatcaattcagaagaacactcattacatgatgatctttgatgcctttgtcattctgacttgcttggtttcattaatcctctgcattagatctgtgattagaggacttcagcttcagcaggagtttgtcaattttttcctcctccattataagaaggaagtttctgtttctgatcaaatggaatttgtcaatggatggtacattatgattattattagtgacatattgacaatcattggatcaattctaaaaatggaaatccaagctaagagtctaactagttatgatgtctgtagcatacttcttgggacttctaccatgctcgtgtggcttggagtcatccgatacctcggtttctttgcaaagtacaacctcctcattttgacccttcaggcagcgctgcccaatgtcatcaggttctgctgctgtgcagctatgatttacttaggttactgcttctgtggatggatcgtgctggggccttaccatgacaagtttcgttctctgaacatggtctctgagtgccttttctctctgataaatggagatgatatgtttgccacgtttgcaaaaatgcagcaaaaaagttacttagtctggctgtttagtagaatttacctctactcattcatcagcctctttatatatatgattttaagtcttttcattgcactgatcactgatacatacgaaacaattaagcaataccaacaagatggcttcccagagactgaacttcgtacatttatatcagaatgcaaagatctacccaactctggaaaatacagattagaagatgaccctccagtatctttattctgctgttgtaaaaagtagctatcaggtttatctgtactttagaggaaaatataatgtgtagctgagttggaacactgtggatattctgagatcagatgtagtatgtttggagactgttattttgagctaattgagacctataattcaccaataactgtttatatttttaaaagcaatatttaatgtctttgcaactttatgctgggattgtttttaaaaaaactttaatgagg

SEQ ID NO: 2369 - protein, 497 aa, Homo sapien
MADPEVVVCSCSSHEEENRCNFNQQTSPSEELLLEDQMRRKLKFFFMNPCEKFWARGRKPWKLAIQILKIAMVTIQYLQLYNVSVGNHAYENKGTKQSAMAICQHFYKRGNIYPGNDTFDIDPEIETECFFVEPDEPFHIGTPAENKLNLTLDFHRLLTVELQFKLKAINLQTVRHQELPDCYDFTLTITFDNKAHSGRIKISLDNDISIRECKDWHVSGSIQKNTHYMMIFDAFVILTCLVSLILCIRSVIRGLQLQQEFVNFFLLHYKKEVSVSDQMEFVNGWYIMIIISDILTIIGSILKMEIQAKSLTSYDVCSILLGTSTMLVWLGVIRYLGFFAKYNLLILTLQAALPNVIRFCCCAAMIYLGYCFCGWIVLGPYHDKFRSLNMVSECLFSLINGDDMFATFAKMQQKSYLVWLFSRIYLYSFISLFIYMILSLFIALITDTYETIKQYQQDGFPETELRTFISECKDLPNSGKYRLEDDPPVSLFCCCKK

SEQ ID NO: 2370 - DNA, 391 bp, Homo sapien
tcaagacccagcagtgggacagccagacagacggcacgatggcactgagctcccagatctgggccgcttgcctcctgctcctcctcctcctcgccagcctgaccagtggctctgttttcccacaacagacgggacaacttgcagagctgcaaccccaggacagagctggagccagggccagctggatgcccatgttccagaggcgaaggaggcgagacacccacttccccatctgcattttctgctgcggctgctgtcatcgatcaaagtgtgggatgtgctgcaagacgtagaacctacctgccctgcccccgtcccctcccttccttatttattcctgctgccccagaacataggtcttggaataaaatggctggttcttttgttttcc

SEQ ID NO: 2371 - protein, 84 aa, Homo sapien
MALSSQIWAACLLLLLLLASLTSGSVFPQQTGQLAELQPQDRAGARASWMPMFQRRRRRDTHFPICIFCCGCCHRSKCGMCCKT

SEQ ID NO: 2372 - DNA, 1256 bp, Homo sapien
cgggaatccctgcagctgagcctgtctctcacgggaccgggaagctggagagagccccaaccctgcccgctggggccgagctccctgctcctgcagcagtcccatgccccacactctgagtctgccctatccacagctgctgggcctctctgtggccaccatggtgactcttacctacttcggggcccactttgctgtcatccgccgagcgtccctggagaagaacccgtaccaggctgtgcaccaatgggccttctctgcggggttgagcctggtgggcctcctgactctgggagccgtgctgagcgctgcagccaccgtgagggaggcccagggcctcatggcagggggcttcctgtgcttctccctggcgttctgcgcacaggtgcaggtggtgttctggagactccacagccccacccaggtggaggacgccatgctggacacctacgacctggtatatgagcaggcgatgaaaggtacgtcccacgtccggcggcaggagctggcggccatccaggacgtgtttctgtgctgtgggaagaagtctcctttcagccgtctggggagcacagaggctgacctgtgtcagggagaggaggcggcgagagaggactgccttcagggcatccggagcttcctgaggacacaccagcaggtcgcctccagcctgaccagcatcggcctggccctcacggtgtccgccttgctcttcagctccttcctgtggtttgccatccgctgtggctgcagcttggaccgcaagggcaaatacaccctgaccccacgagcatgtggccgccagccccaggagcccagcctcttgagatgctcccagggtggacccacacattgtctccactccgaagcagttgctattggtccaagaggatgctcgggtagtcttcggtggctgcaggagagcgatgctgcgcctctgcccctctcctgccacctggctgcccacagagctctccagggcagaagtcgcggtgggctcagtgggtgccctgagcggggtctctcagactgacgtcaggccttggtgggctgcactctcacctggaggctccggggaagcatctgcctccaggaccattcaggctgttgacaagtcaactcctcatggctgtaggactgaggttcccaagtccttgtccctggtcctgtggtccctccaccttcaaaccagcaatggtgcattgagcaaattgtggtcaaatatacatcacatcaaatttaccatcttaaaaaaa

SEQ ID NO: 2373 - protein, 290 aa, Homo sapien
MVTLTYFGAHFAVIRRASLEKNPYQAVHQWAFSAGLSLVGLLTLGAVLSAAATVREAQGLMAGGFLCFSLAFCAQVQVVFWRLHSPTQVEDAMLDTYDLVYEQAMKGTSHVRRQELAAIQDVFLCCGKKSPFSRLGSTEADLCQGEEAAREDCLQGIRSFLRTHQQVASSLTSIGLALTVSALLFSSFLWFAIRCGCSLDRKGKYTLTPRACGRQPQEPSLLRCSQGGPTHCLHSEAVAIGPRGCSGSLRWLQESDAAPLPLSCHLAAHRALQGRSRGGLSGCPERGLSD

SEQ ID NO: 2374 - DNA, 922 bp, Homo sapien
ggccatctctgggcggcggcggcgggcggtgtctgcgcggtcggtgagacccgcgcgggtgagacgctggccctccttacagcctagaaaaaatgacagatctcgtagctgtttgggatgttgctttaagtgacggagtccacaagatcgaatttgaacatgggactacatcaggcaaacgagtagtatatgtagatggaaaggaagagataagaaaagagtggatgttcaaattagtgggcaaagaaacattctatgttggagctgcaaagacaaaagcgaccataaatatagacgctatcagtggttttgcttatgaatatactctggaaattaatgggaaaagtctcaagaagtatatggaggacagatcaaaaaccaccaatacttgggtattacacatggatggtgagaactttagaattgttttggaaaaagatgctatggacgtatggtgcaatggtaaaaaattggagacagcgggtgagtttgtagatgatgggactgaaactcacttcagtatcgggaaccatgactgttacataaaggctgtcagtagtgggaagcggaaagaagggattattcatactctcattgtggataatagagaaatcccagagattgcaagttaatgaattttcatcttaagaagtaaagatcaggactttttaattactgtggtaattaaatgtgttcagtatgtacttatcagtacatttagtctgcaatgttttaattttttaaaaagttacatgaaactaacattccaagggtcaggaaaaaaaccaattatgtatagtcataaaaattacaatttatgatgcaaataatgtaaaatgttttaaagacaaatggcaaataagatatggaccaaagtcactaatgttttacaacagtaacctttactataataaatactttt

SEQ ID NO: 2375 - protein, 179 aa, Homo sapien
MTDLVAVWDVALSDGVHKIEFEHGTTSGKRVVYVDGKEEIRKEWMFKLVGKETFYVGAAKTKATINIDAISGFAYEYTLEINGKSLKKYMEDRSKTTNTWVLHMDGENFRIVLEKDAMDVWCNGKKLETAGEFVDDGTETHFSIGNHDCYIKAVSSGKRKEGIIHTLIVDNREIPEIAS

SEQ ID NO: 2376 - DNA, 1185 bp, Homo sapien
accgtcttccgccgcacgtggattcagcgcgatgcccaaatccaagcgcgacaagaaagtctccttaaccaaaactgccaagaaaggcttggaattgaaacaaaacctgatagaagagcttcggaaatgtgtggacacctacaagtaccttttcatcttctctgtggccaacatgaggaacagcaagctgaaggacatccggaacgcctggaagcacagccggatgttctttggcaaaaacaaggtgatgatggtggccttgggtcggagcccatctgatgaatacaaagacaacctgcaccaggtcagcaaaaggttgaggggtgaggtgggtctcctgttcaccaaccgcacaaaggaagaggtgaatgagtggttcacgaaatacacagaaatggactacgcccgagctggtaacaaagcagctttcactgtgagcctggatccagggcccctggagcagttcccccactccatggagccacagctcaggcagctgggcctgcccaccgccctcaagagaggtgtggtgactctgctgtctgactacgaggtgtgcaaggagggcgatgtgctgaccccagagcaggctcgcgtcctgaagctttttgggtatgagatggctgaattcaaggtgaccatcaaatacatgtgggattcacagtcgggaaggttccagcagatgggagacgacttgccagagagcgcatctgagtccacagaagagtcagactcagaagatgatgactgaaagggactcgggactgaaggtctcctggaagcttctgggtctcactggaccatcaggactgctgccgcccctctggagagagcagctttttatttgtctgtagacagggaacatgatgggcactgacctcctgtaaagaataaaactgtgggccgggcgcggtggctcacgcctggaatcccagcactttgggaagccgaggtgggcagatcataaggtcaggagattaagaccatcctggctaacacggtgaaaccccgtctctactaaaaatagaaaaaaaaactagttgggcatagtggcatgtgcctgtagtcccagctactcaggaggctgaggcaggagaatcacttgaacccgggaggtggaggttgccgtgagttgagattggaccactgctctccagcctgggcaacagagtaaaactctgtccc

SEQ ID NO: 2377 - protein, 239 aa, Homo sapien
MPKSKRDKKVSLTKTAKKGLELKQNLIEELRKCVDTYKYLFIFSVANMRNSKLKDIRNAWKHSRMFFGKNKVMMVALGRSPSDEYKDNLHQVSKRLRGEVGLLFTNRTKEEVNEWFTKYTEMDYARAGNKAAFTVSLDPGPLEQFPHSMEPQLRQLGLPTALKRGVVTLLSDYEVCKEGDVLTPEQARVLKLFGYEMAEFKVTIKYMWDSQSGRFQQMGDDLPESASESTEESDSEDDD

SEQ ID NO: 2378 - DNA, 1115 bp, Homo sapien
ccgtcattgacgccatgagcgcgctgctgcggctgctgcgcacggttgccccagccgctgcgtgcctgcggttggggaccagtgcagggaccgggtcgcgccgtgctatggccctgtaccacactgaggagcgcggccagccctgctcgcagaattaccgcctcttctttaagaatgtaactggtcactacatttccccctttcatgatattcctctgaaggtgaactctaaagaggaaaatggcattcctatgaagaaagcacgaaatgatgaatatgagaatctgtttaatatgattgtagaaatacctcggtggacaaatgctaaaatggagattgccaccaaggagccaatgaatcccattaaacaatatgtaaaggatggaaagctacgctatgtggcgaatatcttcccttacaagggttatatatggaattatggtaccctccctcagattctttcttgtggagaagttattcatgtgaagatccttggaattttggctcttattgatgaaggtgaaacagattggaaattaattgctatcaatgcgaatgatcctgaagcctcaaagtttcatgatattgatgatgttaagaagttcaaaccgggttacctggaagctactcttaattggtttagattatataaggtaccagatggaaaaccagaaaaccagtttgcttttaatggagaattcaaaaacaaggcttttgctcttgaagttattaaatccactcatcaatgttggaaagcattgcttatgaagaactgtaatggaggagctataaattgcacaaacgtgcagatatctgatagccctttccgttgcactcaagaggaagcaagatcattagttgaatcggtatcatcttcaccaaataaagaaagtaatgaagaagagcaagtgtggcacttccttggcaagtgattgaaacatctgaaattctgctgtcaagattcccatctctaaggactccaagactctttttccccaagtgctagagacaagggggtctatgagcatttactgacttcctgttaaaacttcattttttcaaactttttgagctatgcaatatataaataaacagtaagaattttaaattaaaaa

SEQ ID NO: 2379 - protein, 274 aa, Homo sapien [sequence omitted]

SEQ ID NO: 2380 - DNA, 2229 bp, Homo sapien
ggcacgagggccaggaacgccagccgttcacgcgttcggtcctccttggctgactcaccgccctcgccgccgcaccatggacgcccccaggcaggtggtcaactttgggcctggtcccgccaagctgccgcactcagtgttgttagagatacaaaaggaattattagactacaaaggagttggcattagtgttcttgaaatgagtcacaggtcatcagattttgccaagattattaacaatacagagaatcttgtgcgggaattgctagctgttccagacaactataaggtgatttttctgcaaggaggtgggtgcggccagttcagtgctgtccccttaaacctcattggcttgaaagcaggaaggtgtgcggactatgtggtgacaggagcttggtcagctaaggccgcagaagaagccaagaagtttgggactataaatatcgttcaccctaaacttgggagttatacaaaaattccagatccaagcacctggaacctcaacccagatgcctcctacgtgtattattgcgcaaatgagacggtgcatggtgtggagtttgactttatacccgatgtcaagggagcagtactggtttgtgacatgtcctcaaacttcctgtccaagccagtggatgtttccaagtttggtgtgatttttgctggtgcccagaagaatgttggctctgctggggtcaccgtggtgattgtccgtgatgacctgctggggtttgccctccgagagtgcccctcggtcctggaatacaaggtgcaggctggaaacagctccttgtacaacacgcctccatgtttcagcatctacgtcatgggcttggttctggagtggattaaaaacaatggaggtgccgcggccatggagaagcttagctccatcaaatctcaaacaatttatgagattattgataattctcaaggattctacgtttgtccagtggagccccaaaatagaagcaagatgaatattccattccgcattggcaatgccaaaggagatgatgctttagaaaaaagatttcttgataaagctcttgaactcaatatgttgtccttgaaagggcataggtctgtgggaggcatccgggcctctctgtataatgctgtcacaattgaagacgttcagaagctggccgccttcatgaaaaaatttttggagatgcatcagctatgaacacatcctaaccaggatatactctgttcttgaacaacatacaaagtttaaagtaacttggggatggctacaaaaagttaacacagtatttttctcaaatgaacatgtttattgcagattcttcttttttgaaagaacaacagcaaaacatccacaactctgtaaagctggtgggacctaatgtcaccttaattctgacttgaactggaagcattttaagaaatcttgttgcttttctaacaaattcccgcgtattttgcctttgctgctactttttctagttagatttcaaacttgcctgtggacttaataatgcaagttgcgattaattatttctggagtcatgggaacacacagcacagagggtaggggggccctctaggtgctgaatctacacatctgtggggtctcctgggttcagcggctgttgattcaaggtcaacattgaccattggaggagtggtttaagagtgccaggcgaagggcaaactgtagatcgatctttatgctgttattacaggagaagtgacatactttatatatgtttatattagcaaggtctgtttttaataccatatactttatatttctatacatttatatttctaataatacagttatcactgatatatgtagacacttttagaatttattaaatccttgaccttgtgcattatagcattccattagcaagagttgtaccccctccccagtcttcgccttcctctttttaagctgttttatgaaaaagacctagaagttcttgattcatttttaccattctttccataggtagaagagaaagttgattggttggttgtttttcaattatgccattaaactaaacatttctgttaaattaccctatcctttgttctctactgttttctttgtaatgtatgactacgagagtgatactttgctgaaaagtctttcccctattgtttatctattgtcagtattttatgttgaatatgtaaagaacattaaagtcctaaaacatctaaaaaaaaaaaaaaaaaaaaaaaaaaaaaaaaaaa

SEQ ID NO: 2381 - protein, 370 aa, Homo sapien; identical to SEQ ID NO: 1484

SEQ ID NO: 2382 - DNA, 2264 bp, Homo sapien
gggatcaggctcgtgaacatattcggcaaaacctagaaagtttcataagacaggactttccaggaactaaattgagcctgtttggctcctccaaaaatggatttgggttcaaacagagtgaccttgacgtctgtatgacaattaatgggcttgaaactgctgagggattggactgtgtcagaactattgaagaattagcaagagtcctcagaaaacattcaggcctgagaaacatcttacctattacaacagcaaaggtgccaattgtgaagttcttccatttgagaagtggtctggaagtagatatcagtttgtataacacattggcccttcataacacaaggcttttatctgcttattccgccattgatcccagagtgaagtatttgtgctataccatgaaagtatttacaaagatatacaaaggtgaaaagaaacctgaaatatttgttgatggctggaatatttatttttttgatcaaatagatgaactgcctacctattggtcagaatgtggaaaaaatacagaatctgttgggcagttatggttgggccttcttcgtttctacacagaggaatttgattttaaagaacatgttattagcatcaggagaaaaagtctgcttacaacttttaagaaacagtggacctcaaaatacattgttattgaagatccctttgatttgaatcataatcttggagctggattatcaaggaaaatgacaaattttataatgaaggcttttatcaatggtagaagagtatttggtattcctgtcaagggatttccaaaggactacccctcaaaaatggaatacttttttgatccagatgtgttaactgaaggagagctggccccaaatgatagatgttgtcgaatttgtggaaaaatcggacacttcatgaaggactgtcctatgaggagaaaagtaagacggcggcgagatcaggaagatgccctgaaccaaagataccctgagaacaaggaaaaaagaagcaaagaggacaaagaaattcacaacaagtacacagaaagggaggtgtcaacaaaagaagataagcccatacagtgcacacctcagaaagccaagccaatgcgggcagctgctgacctggggagggagaagatcctcaggccaccagtagaaaaatggaagagacaggatgacaaagacttaagagaaaaacgttgttttatttgtggaagagaagggcacattaaaaaggaatgcccacagtttaaaggctcttcaggtagcctttccagtaaatatatgactcagggaaaagcctcagcgaagaggacccagcaggaatcatgagggaaggaaaatgcagcactctaaatggccactcaggcgttcctattcactcggaaaattaggttcatttcacaggacacagcagtgtagatcaggcttcaacttaacatttaagggaaatgtcagatttttttttaatttaatgaaattgttaatgaggaaaaatttttaatatagtcttatctaccacacatccccatagatttaaggattttaatagaaagtcatgatgtatgtatttaagccacgttaaaagaaaaaatataactatggaccggtattcagtgaatacagtttcatggtttttaattctttcaaagcacattaaaaatggtgtgctgataaaccccaagtaaattaaccctttttccgtataaatccattttttgttttgaagaggggaaattatacttattgttgtttactgaatcctggtgtgaaagcatatcagatatgtatgaactgctactgctgtacttccgatttacggacatcattttattgctatttgtagacgtgataacatgaacatgagtacctatttatgtgggccttcagtggatgggcagtgccactcaggtctctggggtttccctctctaattttaagtaaattgacatataactactatgcttataaaaatgaagtaaggaaaacaagtagtcctgtttgccactaaaaacattttcaaaggaaaaataaaatgaaagtactttttactttttatgatactcagaaattaggatgaagaacttttaaaattgctgaaggtcaaagaggttatctctgccagtcacaagtgtggctggtgtcattctgggtctgactggagccctcctggactgtttctttaatttcaaaagccctgcagacatagtacctggtcagaactatgcctcggtttatttatcattttgaaataaaatcaaaatttcaacctgt

SEQ ID NO: 2383 - protein, 395 aa, Homo sapien
MTINGLETAEGLDCVRTIEELARVLRKHSGLRNILPITTAKVPIVKFFHLRSGLEVDISLYNTLALHNTRLLSAYSAIDPRVKYLCYTMKVFTKIYKGEKKPEIFVDGWNIYFFDQIDELPTYWSECGKNTESVGQLWLGLLRFYTEEFDFKEHVISIRRKSLLTTFKKQWTSKYIVIEDPFDLNHNLGAGLSRKMTNFIMKAFINGRRVFGIPVKGFPKDYPSKMEYFFDPDVLTEGELAPNDRCCRICGKIGHFMKDCPMRRKVRRRRDQEDALNQRYPENKEKRSKEDKEIHNKYTEREVSTKEDKPIQCTPQKAKPMRAAADLGREKILRPPVEKWKRQDDKDLREKRCFICGREGHIKKECPQFKGSSGSLSSKYMTQGKASAKRTQQES

SEQ ID NO: 2384 - DNA, 1662 bp, Homo sapien
ggatcagcttccagcccagtcggcccggcccgggggccatggagctccgagcggcggatcgcgagcctcctgcgaaccccagcctgcacgcccggttagcattcggccgggagatgcggcagtggaatctggaagggcggtgaaaaacctacgtcctgccctcgcccggcctctccattcgtcccccgggtagagaggtgcccggctcccaccccttcccagccccagccctggagacagcagcccctagactactgagggacagcgacagtatgaaggctccgggtcggctcgtgctcatcatcctgtgctccgtggtcttctctgccgtctacatcctcctgtgctgctgggccggcctgcccctctgcctggccacctgcctggaccaccacttccccacaggctccaggcccactgtgccgggacccctgcacttcagtggatatagcagtgtgccagatgggaagccgctggtccgcgagccctgccgcagctgtgccgtggtgtccagctccggccaaatgctgggctcaggcctgggtgctgagatcgacagtgccgagtgcgtgttccgcatgaaccaggcgcccaccgtgggctttgaggcggatgtgggccagcgcagcaccctgcgtgtcgtctcacacacaagcgtgccgctgctgctgcgcaactattcacactacctccagaaggcccgagacacgctctacatggtgtggggccagggcaggcacatggaccgggtgctcggcggccgcacctaccgcacgctgctgcagctcaccaggatgtaccccggcctgcaggtgtacaccttcacggagcgcatgatggcctactgcgaccagatcttccaggacgagacgggcaagaaccggaggcagtcgggctccttcctcagcaccggctggttcaccatgatcctcgcgctggagctgtgtgaggagatcgtggtctatgggatggtcagcgacagctactgcagggagaagagccacccctcagtgccttaccactactttgagaagggccggctagatgagtgtcagatgtacctggcacacgagcaggcgccccgaagcgcccaccgcttcatcactgagaaggcggtcttctcccgctgggccaagaagaggcccatcgtgttcgcccatccgtcctggaggactgagtagcttccgtcgtcctgccagccgccatgccgttgcgaggcctccgggatgtcccatcccaagccatcacactccacaaaaacatttaatttatggatcctgcctcctgccacgtgctgggtggacctaaggttccttcccaccccattctggcgacacttggagccatctcaggctccactccctgagtaattcatggcatttgggggctcaccccacctccaggtctgtcaagtggcctttgtccctggggctgatggcccccaactcaccagcatcatgaccttgtgccagtcctggtcctccctccccagccgcccctaccaccttttggtgccacacttctcaggctggccgccctggttggggcagccgagagcctggggttcattggtgaaggggccttggagttgtgactgccggggccgtatcaggaacgtacgggtaaatgtgtgttttctggaaaaaaaaaaaaaaaaaaaaa

SEQ ID NO: 2385 - protein, 302 aa, Homo sapien [sequence omitted]

SEQ ID NO: 2386 - DNA, 1215 bp, Homo sapien
gtgacattgagctcaccagcgccaccgtccccggcgaagttctgcgctggtcggcggagagcaagtggccatggggagcctcagcggtctgcgcctggcagcaggaagctgttttaggttatgtgaaagagatgtttcctcatctctaaggcttaccagaagctctgatttgaagagaataaatggattttgcacaaaaccacaggaaagtcccggagctccattcccgcacttacaacagagtgcctttacacaaacctacggattggcagaaaaagatcctcatatggtcaggtcgcttcaaaaggaagatgaaatcccagagactgtctcgttggagatgcttgatgctgcaaagaacaagatgcgagtgaagatcagctatctaatgattgccctgacggtggtaggatgcatctttcattggttattgagggcaagaagcttgcccaaagaccgagactttaaccagcttggacctttagaaaagaaagctcgtctgaaagaaggaagcagctatgaaggccaaaacagattaccaaaggtatccgtgttggttgggattttgaaaatccaggaattatgttttaacgtgcctgtattaaaaaggatgtggtatgaggatccatttcataaagtatgatttgcccaaacctgtaccatttccgtatttctgctgtagaagtagaaataaattttcttaaataatgactgtgttttattgttttgatccaagtcaagtgtagcctctcagccttttggagaaaaatgaaacaatttatttcaacttgaataccaactcttcagagaagcaggtaccatatcttacttctcttcccattatcaaagtaacctctccacaggcgaactcattttgaggagataaggaaggccagttgagtatatggcccaggtgcagcttggagggccagccttctcaaatgtcctggtgtactggtggggaggctgccccctaatagagcgagcgctgagaagcagccagaccacattctataatctttgaacatgctggcagatggaggcttttaggagaatagttttttaaacattctgacaaggtccagccaggaatttctaaggacttagaaatcccagtgtcatggagttgcttgggggtcaacacaagtcacctcttagcttcatgccttagaattctcaactgggctgtttttcttaccacctgagaaactaaat

SEQ ID NO: 2387 - protein, 190 aa, Homo sapien
MGSLSGLRLAAGSCFRLCERDVSSSLRLTRSSDLKRINGFCTKPQESPGAPFPHLQQSAFTQTYGLAEKDPHMVRSLQKEDEIPETVSLEMLDAAKNKMRVKISYLMIALTVVGCIFHWLLRARSLPKDRDFNQLGPLEKKARLKEGSSYEGQNRLPKVSVLVGILKIQELCFNVPVLKRMWYEDPFHKV

SEQ ID NO: 2388 - DNA, 3680 bp, Homo sapien
ggcacgaggctggggcgcagagcagcggcgggaggaggcggacacgtggcaacagcggtagcagcccgggcggcggcagcaacagcggcggcggcatcggcccgagccgccggccgccctcccaccctcccgccccgcggcagccctagctccctccacttggctcccctggtcccgctcgctcggccgggagctgctctgtgcttttctctctgattctccagcgacaggacccggcgccgggcactgagcaccgccaccatggggaagggggttggacgtgataagtatgagcctgcagctgtttcagaacaaggtgataaaaagggcaaaaagggcaaaaaagacagggacatggatgaactgaagaaagaagtttctatggatgatcataaacttagccttgatgaacttcatcgtaaatatggaacagacttgagccggggattaacatctgctcgtgcagctgagatcctggcgcgagatggtcccaacgccctcactccccctcccactactcctgaatggatcaagttttgtcggcagctctttggggggttctcaatgttactgtggattggagcgattctttgtttcttggcttatagcatccaagctgctacagaagaggaacctcaaaacgataatctgtacctgggtgtggtgctatcagccgttgtaatcataactggttgcttctcctactatcaagaagctaaaagttcaaagatcatggaatccttcaaaaacatggtccctcagcaagcccttgtgattcgaaatggtgagaaaatgagcataaatgcggaggaagttgtggttggggatctggtggaagtaaaaggaggagaccgaattcctgctgacctcagaatcatatctgcaaatggctgcaaggtggataactcctcgctcactggtgaatcagaaccccagactaggtctccagatttcacaaatgaaaaccccctggagacgaggaacattgccttcttttcaaccaattgtgttgaaggcaccgcacgtggtattgttgtctacactggggatcgcactgtgatgggaagaattgccacacttgcttctgggctggaaggaggccagacccccattgctgcagaaattgaacattttatccacatcatcacgggtgtggctgtgttcctgggtgtgtctttcttcatcctttctctcatccttgagtacacctggcttgaggctgtcatcttcctcatcggtatcatcgtagccaatgtgccggaaggtttgctggccactgtcacggtctgtctgacacttactgccaaacgcatggcaaggaaaaactgcttagtgaagaacttagaagctgtggagaccttggggtccacatccaccatctgctctgataaaactggaactctgactcagaaccggatgacagtggcccacatgtggtttgacaatcaaatccatgaagctgatacgacagagaatcagagtggtgtctcttttgacaagacttcagctacctggcttgctctgtccagaattgcaggtctttgtaacagggcagtgtttcaggctaaccaggaaaacctacctattcttaagcgggcagttgcaggagatgcctctgagtcagcactcttaaagtgcatagagctgtgctgtggttccgtgaaggagatgagagaaagatacgccaaaatcgtcgagatacccttcaactccaccaacaagtaccagttgtctattcataagaaccccaacacatcagagccccaacacctgttggtgatgaagggcgccccagaaaggatcctagaccgttgcagctctatcctcctccacggcaaggagcagcccctggatgaggagctgaaagacgcctttcagaacgcctatttggagctggggggcctcggagaacgagtcctaggtttctgccacctctttctgccagatgaacagtttcctgaagggttccagtttgacactgacgatgtgaatttccctatcgataatctgtgctttgttgggctcatctccatgattgaccctccacgggcggccgttcctgatgccgtgggcaaatgtcgaagtgctggaattaaggtcatcatggtcacaggagaccatccaatcacagctaaagctattgccaaaggtgtgggcatcatctcagaaggcaatgagaccgtggaagacattgctgcccgcctcaacatcccagtcagccaggtgaaccccagggatgccaaggcctgcgtagtacacggcagtgatctaaaggacatgacctccgagcagctggatgacattttgaagtaccacactgagatagtgtttgccaggacctcccctcagcagaagctcatcattgtggaaggctgccaaagacagggtgctatcgtggctgtgactggtgacggtgtgaatgactctccagctttgaagaaagcagacattggggttgctatggggattgctggctcagatgtgtccaagcaagctgctgacatgattcttctggatgacaactttgcctcaattgtgactggagtagaggaaggtcgtctgatctttgataacttgaagaaatccattgcttataccttaaccagtaacattcccgagatcaccccgttcctgatatttattattgcaaacattccactaccactggggactgtcaccatcctctgcattgacttgggcactgacatggttcctgccatctccctggcttatgagcaggctgagagtgacatcatgaagagacagcccagaaatcccaaaacagacaaacttgtgaatgagcggctgatcagcatggcctatgggcagattggaatgatccaggccctgggaggcttctttacttactttgtgattctggctgagaacggcttcctcccaattcacctgttgggcctccgagtggactgggatgaccgctggatcaacgatgtggaagacagctacgggcagcagtggacctatgagcagaggaaaatcgtggagttcacctgccacacagccttcttcgtcagtatcgtggtggtgcagtgggccgacttggtcatctgtaagaccaggaggaattcggtcttccagcaggggatgaagaacaagatcttgatatttggcctctttgaagagacagccctggctgctttcctttcctactgccctggaatgggtgttgctcttaggatgtatcccctcaaacctacctggtggttctgtgccttcccctactctcttctcatcttcgtatatgacgaagtcagaaaactcatcatcaggcgacgccctggcggctgggtggagaaggaaacctactattagccccccgtcctgcacgccgtggagcatcaggccacacactctgcatccgacacccaccccctctttgtgtacttcagtcttggagtttggaactctaccctggtaggaaagcaccgcagcatgtggggaagcaagacgtcctggaatgaagcatgtagctctatggggggaggggggagggctgcctgaaaaccatccatctgtggaaatgacagcggggaaggtttttatgtgcctttttgtttttgtaaaaaaggaacacccggaaagactgaaagaatacattttatatctggatttttacaaataaagatggctattataatggaaaaaaaaaaaaaaaaaaa

SEQ ID NO: 2389 - protein, 1023 aa, Homo sapien
MGKGVGRDKYEPAAVSEQGDKKGKKGKKDRDMDELKKEVSMDDHKLSLDELHRKYGTDLSRGLTSARAAEILARDGPNALTPPPTTPEWIKFCRQLFGGFSMLLWIGAILCFLAYSIQAATEEEPQNDNLYLGVVLSAVVIITGCFSYYQEAKSSKIMESFKNMVPQQALVIRNGEKMSINAEEVVVGDLVEVKGGDRIPADLRIISANGCKVDNSSLTGESEPQTRSPDFTNENPLETRNIAFFSTNCVEGTARGIVVYTGDRTVMGRIATLASGLEGGQTPIAAEIEHFIHIITGVAVFLGVSFFILSLILEYTWLEAVIFLIGIIVANVPEGLLATVTVCLTLTAKRMARKNCLVKNLEAVETLGSTSTICSDKTGTLTQNRMTVAHMWFDNQIHEADTTENQSGVSFDKTSATWLALSRIAGLCNRAVFQANQENLPILKRAVAGDASESALLKCIELCCGSVKEMRERYAKIVEIPFNSTNKYQLSIHKNPNTSEPQHLLVMKGAPERILDRCSSILLHGKEQPLDEELKDAFQNAYLELGGLGERVLGFCHLFLPDEQFPEGFQFDTDDVNFPIDNLCFVGLISMIDPPRAAVPDAVGKCRSAGIKVIMVTGDHPITAKAIAKGVGIISEGNETVEDIAARLNIPVSQVNPRDAKACVVHGSDLKDMTSEQLDDILKYHTEIVFARTSPQQKLIIVEGCQRQGAIVAVTGDGVNDSPALKKADIGVAMGIAGSDVSKQAADMILLDDNFASIVTGVEEGRLIFDNLKKSIAYTLTSNIPEITPFLIFIIANIPLPLGTVTILCIDLGTDMVPAISLAYEQAESDIMKRQPRNPKTDKLVNERLISMAYGQIGMIQALGGFFTYFVILAENGFLPIHLLGLRVDWDDRWINDVEDSYGQQWTYEQRKIVEFTCHTAFFVSIVVVQWADLVICKTRRNSVFQQGMKNKILIFGLFEETALAAFLSYCPGMGVALRMYPLKPTWWFCAFPYSLLIFVYDEVRKLIIRRRPGGWVEKETYY

SEQ ID NO: 2390 - DNA, 1041 bp, Homo sapien
gcccccgagcaggagccggtgcgagcggagcagagccgaggtcgggccgcgagcggagccggctgagcgggcgccgagctcccgccatggcccggaacacgctgtcctcgcgcttccgccgggtggacatcgacgaatttgacgagaacaaatttgtggacgagcaggaggaggcggcggcggcggcggcggagccaggcccggacccgagcgaggtggacgggctcctgcggcaaggggacatgcttcgggcattccatgcagccttgcggaactctcccgtcaacaccaagaatcaagctgtgaaggagcgagcccagggcgtggtgctgaaagtgctcacaaacttcaagagcagtgagattgagcaggctgtgcagtcactggacagaaacggcgttgacttgttaatgaagtacatttataaaggctttgagaagcccacagaaaatagcagcgcagtgttactccagtggcacgaaaaggccttagcagtaggaggactaggctccattataagagttcttacagcaagaaagactgtttaaaaaaaataaaaagactcatgttaccttgagaagaattctggatgcccaggctggtgaagaagggattgacaatggaccatcttcctaggaactcccaagtaaactatttcaggacatgtatctgctgaaatgtattttattttcaaggtggaggggaaaatcgtctgtttcctaaatcctgtttaggatctgatagtctatgcctttgtctccgagtactgcagaactgacattttgacggtctaccagcgtggcggctggtgttggtcagatgcacctgtgtgcactgggggagggatggtttgggcaggtgcagatccaagggctgtggtaaacgggagagcttgtgtttttgaagtggaaaaaaacccaagagtttgtacagacatcctgtcttcccagagaaggtggacactcttgggctcattgtaaagtgcctgctgcatcaataaagctcttggcttattagtctatacaaaaaaaaaaaaaaaaa

SEQ ID NO: 2391 - protein, 153 aa, Homo sapien
MARNTLSSRFRRVDIDEFDENKFVDEQEEAAAAAAEPGPDPSEVDGLLRQGDMLRAFHAALRNSPVNTKNQAVKERAQGVVLKVLTNFKSSEIEQAVQSLDRNGVDLLMKYIYKGFEKPTENSSAVLLQWHEKALAVGGLGSIIRVLTARKTV

SEQ ID NO: 2392 - DNA, 1851 bp, Homo sapien
gcggaagctcggcagtgcgcgtgcgcccgcacccgcactccaaattagaaaggggacgtctagtgggttgcccgggaggggtggcgggagcggtcctggaaataatctgtcctctgtcgccgggaactggcgaggtagttccttcgcggtggagagacctggaatggccaaatatcaaggtgaagttcatagtttgaaactggatgatgattcagttatagaaggagtaagcgaccaagtacttgtggcagttgtggtcagtttcgctttgattgctaccctggtatatgcacttttcagaaatgtacatcaaaacattcacccagaaaaccaggagctagtaagggtacttcgagaacagcttcaaacagaacaggatgcacctgctgccactcgacagcagttctacactgacatgtactgtcccatctgcctgcaccaagcctccttcccggtggagaccaactgtggacatcttttttgtggtgcctgcattattgcttactggcgatatggttcatggcttggggcaatcagttgtccaatctgtagacaaacggtaaccttactcctaacagtatttggtgaagatgatcagtctcaggatgttctgagattgcatcaggatattaatgattataaccggagattctcagggcaacccagatctattatggagagaattatggatctacccactttactgaggcatgcattcagggaaatgttttcagtcgggggccttttctggatgtttcgcatcaggataatactttgtttaatgggagcttttttctatcttatatcacctctagattttgtacctgaagccttgtttggaattctaggctttctagatgatttctttgtcatctttttattgcttatctacatctctattatgtatcgagaagtgataacccaaaggctaactagatgaaaaagaaaacaaaactgagtttactaggatatctgagctaatgtagaacatcaaacagaaggacccatggcagtataaagcaatgaagcaatggagtattatctcacaaatataaaaccactataagacaaacatttgattatcatttgacaaatacctaggtataactggaattttcatgtttgaagttctaatattaagtttagaattataatgatctacagttgtatcttgattctatgttgtctggaaaaaatatggaattatataaaaagggatgcttttatatatttttcttttccccagaattacttagattaattagatgtatagtaaaatattgttaaatgtcagtttatccatcttatccttctcagcaggtacctatatgataatatatagctgtgaaactcatctaaatatttttgttccaataaaatattatatactattggggaaaattcagtatttcttttagtgctagctaagttttgtgcatttggagcagttctgccttttcattctggtataattaattatttgctatcagctgaaactgaaagaagaaacttgaacttcatacttcgatatcatattctagtttacagaacacattttaatcaatagaagaattaagatgaaaaacatggccgggcggggtggctcacgcctgtaatcctagcactttgggaggctgaggcgggtagatcacaaggtcaggagatcaggaccatcctggctaacatggtgaaaccccgtctctactaaaaatacaaaaaattagccaggcgtggtggcaggcgcctgtagtcccagctactcgggaggctgaggcagaagaatggcgtaaacccaggaggtggattgcgccactgcactccagcctgggcaacagagtgagactccctctc

SEQ ID NO: 2393 - protein, 258 aa, Homo sapien
MAKYQGEVHSLKLDDDSVIEGVSDQVLVAVVVSFALIATLVYALFRNVHQNIHPENQELVRVLREQLQTEQDAPAATRQQFYTDMYCPICLHQASFPVETNCGHLFCGACIIAYWRYGSWLGAISCPICRQTVTLLLTVFGEDDQSQDVLRLHQDINDYNRRFSGQPRSIMERIMDLPTLLRHAFREMFSVGGLFWMFRIRIILCLMGAFFYLISPLDFVPEALFGILGFLDDFFVIFLLLIYISIMYREVITQRLTR

SEQ ID NO: 2394 - DNA, 3329 bp, Homo sapien
cccacgcgtccgcggacgcgtgggtcgacccacgcgtccggccgctcggcccgggggcttcgggctgtcgggccggcgctcccttctctgccaggtggcgagtacacctgctcacgtaggcgtcatgaggtctccggttcgagacctggcccggaacgatggcgaggagagcacggaccgcacgcctcttctaccgggcgccccacgggccgaagccgctccagtgtgctgctctgctcgttacaacttagcaattttggccttttttggtttcttcattgtgtatgcattacgtgtgaatctgagtgttgcgttagtggatatggtagattcaaatacaactttagaagataatagaacttccaaggcatgtccagagcattctgctcccataaaagttcatcataatcaaacgggtaagaagtaccaatgggatgcagaaactcaaggatggattctcggttcctttttttatggctacatcatcacacagattcctggaggatatgttgccagcaaaataggggggaaaatgctgctaggatttgggatccttggcactgctgtcctcaccctgttcactcccattgctgcagatttaggagttggaccactcattgtactcagagcactagaaggactaggagagggtgttacatttccagccatgcatgccatgtggtcttcttgggctccccctcttgaaagaagcaaacttcttagcatttcatatgcaggagcacagcttgggacagtaatttctcttcctctttctggaataatttgctactatatgaattggacttatgtcttctacttttttggtactattggaatattttggtttcttttgtggatctggttagttagtgacacaccacaaaaacacaagagaatttcccattatgaaaaggaatacattctttcatcattaagaaatcagctttcttcacagaagtcagtgccgtgggtacccattttaaaatccctgccactttgggctatcgtagttgcacacttttcttacaactggactttttatactttattgacattattgcctacttatatgaaggagatcctaaggttcaatgttcaagagaatgggtttttatcttcattgccttatttaggctcttggttatgtatgatcctgtctggtcaagctgctgacaatttaagggcaaaatggaatttttcaactttatgtgttcgcagaatttttagccttataggaatgattggacctgcagtattcctggtagctgctggcttcattggctgtgattattctttggccgttgctttcctaactatatcaacaacactgggaggcttttgctcttctggatttagcatcaaccatctggatattgctccttcgtatgctggtatcctcctgggcatcacaaatacatttgccactattccaggaatggttgggcccgtcattgctaaaagtctgacccctgataacactgttggagaatggcaaaccgtgttctatattgctgctgctattaatgtttttggtgccattttctttacactattcgccaaaggtgaagtacaaaactgggctctcaatgatcaccatggacacagacactgaaggaaccaataaataatcctgcctctattaatgtatttttatttatcatgtaacctcaaagtgccttctgtattgtgtaagcattctatgtctttttttaattgtacttgtattagatttttaaggcctataatcatgaaatatcactagttgccagaataataaaatgaactgtgtttaattatgaataatatgtaagctaggacttctactttaggttcacatacctgcctgctagtcgggcaacatgaagtaggacagttctgttgattttttagggccatactaaagggaatgagctgaaacagacctcctgatacctttgcttaattaaactagatgataattctcaggtactgataaacacctgttgttgttcactttcctcataaaaattgtcagctctctctgacacttagacctcaaactttagcatctctgtggagctgccatccactgtataatttcgcctggcaactggactgaggggagtgtgcccaggcagctgccaagcactccctccctggcttcagggtcagagtgcccagcgtttatcagaggcagcatccaagcccagagccagtgtcgactcttcggctggtgcctttcctctgaggggctatcaatgtgtagataaagccctgagtaggcaagagcagtgagatccactgctatggtcttgatacatcctcaaactttcccttcccagcacagaggaatattggctggcatgcaacctgcaaaagaaaaatgcgaagcggccgggcacggtggctcatgcctgtagtcccagcactttggggggctgaggtgggcgaatcatgagatcaggagttcgagaccagcctggccagcatggtgaaaccccatctctactaaaaatacaaaaaattagctgggcgtggtgacgggcgcctgtaatcccagatactcaggaggctgaggtaggagaatcacttgaacctgggagatggaagttgcagtgaaccaagatcacgccactgcactccagcctgggcgatggagcgagactccaactcaaaaaaaaaaaaagaataaagaaagaaaagtgcgatgcccagtcaatcacaaataagatcatcctggtttaaatctactctcacatggatcacagtataaatttctatgtgctgtgttttgttcgtttgtattttgtagagatggggtctcgttttgtcgcccaggctggttttgaactcctggcttcaagcgatcctcctgtctcggcctcacaaagtgttgagactacaggcatgagccactgtgcccagcctgttctatgtttttaagctacacgagaattttttttttaattaattctcactgtttgttcagtctgtcttcatctaagtttgtgttgcagtttaaagttaaagtgacttttaaaggccacatcacctgagactagggtaatcatctttacttctggttcctgaaatcatatttttccagtggaccatcctccagtggctgtggttgttgagcatgctttcagaacacctatgtggcttaaaacttagtttatgttttgtgttcaacactacgtgtaatattttaaaactgtttaatgtgatgtgaatacatttatgtacatttatttttaaatttgtaaatagctttaaattgctatggcaatgtttcttttataaatcatcaaaataaacctttgtgaattgaaaaaaaaaaaaaaaaaaaa

SEQ ID NO: 2395 - protein, 495 aa, Homo sapien
MRSPVRDLARNDGEESTDRTPLLPGAPRAEAAPVCCSARYNLAILAFFGFFIVYALRVNLSVALVDMVDSNTTLEDNRTSKACPEHSAPIKVHHNQTGKKYQWDAETQGWILGSFFYGYIITQIPGGYVASKIGGKMLLGFGILGTAVLTLFTPIAADLGVGPLIVLRALEGLGEGVTFPAMHAMWSSWAPPLERSKLLSISYAGAQLGTVISLPLSGIICYYMNWTYVFYFFGTIGIFWFLLWIWLVSDTPQKHKRISHYEKEYILSSLRNQLSSQKSVPWVPILKSLPLWAIVVAHFSYNWTFYTLLTLLPTYMKEILRFNVQENGFLSSLPYLGSWLCMILSGQAADNLRAKWNFSTLCVRRIFSLIGMIGPAVFLVAAGFIGCDYSLAVAFLTISTTLGGFCSSGFSINHLDIAPSYAGILLGITNTFATIPGMVGPVIAKSLTPDNTVGEWQTVFYIAAAINVFGAIFFTLFAKGEVQNWALNDHHGHRH

SEQ ID NO: 2396 - DNA, 2291 bp, Homo sapien
taagaagtctcttgaaataaaagaagaaaaaattgctgctttagaagctcgattagaagaatccacgaattataaccagcaattgcgccaagaacttaaaacaaatgctacactgcaagcagagaagcaagcgttgaaaactcaactgaagcaacttgagacacagaacaataatttgcaggctcagattcttgcacttcagaggcagacagtgtcattacaagaacagaataccactcttcaaacacagaatgccaagcttcaggttgaaaattccacccttaattcccaaagtacctcactcatgaaccagaatgcccaactcctaatccagcagtcttccttagaaaatgaaaatgaatctgtaatcaaagagcgagaagacctaaaatctctctatgattctctgatcaaagatcatgaaaagctggaacttcttcatgaacgtcaggcttcagagtatgaatctcttatctctaaacatggaactctgaagtctgcccacaaaaatcttgaggtggaacatagagaccttgaagaccgttacaatcagttattaaaacagaaaggacagttggaagatttggaaaaaatgctcaaagtagaacaggaaaaaatgctgcttgaaaataaaaatcatgaaacagtagctgcagaatacaagaaactttgtggtgaaaatgataggctgaatcatacctatagtcaacttttaaaagagactgaagttttacaaactgaccataaaaatttgaaaagtcttctgaataattccaaactggaacaaacaagattagaagctgaattttcaaaactaaaggaacaataccaacaattggatattacatcaaccaagctgaataaccagtgtgagttgctaagccaacttaaaggaaatttagaagaagaaaatcggcatctactagatcaaattcagacattaatgctacagaacagaacacttttggagcagaatatggaaagcaaggatctttttcatgttgaacaaagacagtacattgataagttaaatgaattaagacgtcagaaggagaaactagaagagaaaattatggatcaatacaaattttatgacccatctcctcctagaaggagaggcaactggattactctaaaaatgagaaaattgataaagtctaagaaagatattaatcgggaacgccagaaatctctaacattaacacccacccgctcagactccagtgaaggatttcttcagctccctcatcaagacagtcaagatagttcttcagtaggttcaaactctttagaagatggccagaccttggggaccaagaaaagcagcaccatgaatgacctggtgcagtccatggtcctagcaggacagtggacaggtagtactgagaatttggaggttcctgatgttatttcaacgggtaaaaggagaaaagaattgggagctatggccttctctactacagccatcaacttttcaactgtcaactcttctgcaggcttcagatccaagcagttggttaataataaagatactacatcctttgaagacataagtccacaaggtgttagtgatgattctagtacgggatcaagagttcatgcttcaagaccagccagccttgatagtggcagaacatccactagcaatagcaataataatgcttcactacatgaagtcaaagcaggtgcagttaataaccaaagcaggccacaaagccacagcagtggagaatttagcctgcttcatgaccatgaggcttggtccagcagtggtagcagtccaatccagtacttgaaaagacagaccagatcaagcccagtgctccagcacaaaatatctgaaacactggagagtcgacatcacaagatcaaaactggttcccctggaagtgaagttgttactctacaacagtttttggaagaaagcaataagcttacctcagtacagataaagtcctcaagtcaagagaatcttttagatgaagtaatgaaaagtttgtctgtctcttctgactttttgggaaaagacaaaccagttagctgtggtctggccaggtcagtaagtggaaaaaccccaggggacttctatgatagacggacaactaagcctgagtttttgagacctggtcctcgaaaaactgaagatacctacttcattagttctgcgggaaaacctacaccaggcactcaaggaaaaataaaatcagaagactgaaggagttgaaagaccagtagacgctcctctactctttgagacatcactggcctataataaatgggttaatttatgt

SEQ ID NO: 2397 - protein, 636 aa, Homo sapien
MNQNAQLLIQQSSLENENESVIKEREDLKSLYDSLIKDHEKLELLHERQASEYESLISKHGTLKSAHKNLEVEHRDLEDRYNQLLKQKGQLEDLEKMLKVEQEKMLLENKNHETVAAEYKKLCGENDRLNHTYSQLLKETEVLQTDHKNLKSLLNNSKLEQTRLEAEFSKLKEQYQQLDITSTKLNNQCELLSQLKGNLEEENRHLLDQIQTLMLQNRTLLEQNMESKDLFHVEQRQYIDKLNELRRQKEKLEEKIMDQYKFYDPSPPRRRGNWITLKMRKLIKSKKDINRERQKSLTLTPTRSDSSEGFLQLPHQDSQDSSSVGSNSLEDGQTLGTKKSSTMNDLVQSMVLAGQWTGSTENLEVPDVISTGKRRKELGAMAFSTTAINFSTVNSSAGFRSKQLVNNKDTTSFEDISPQGVSDDSSTGSRVHASRPASLDSGRTSTSNSNNNASLHEVKAGAVNNQSRPQSHSSGEFSLLHDHEAWSSSGSSPIQYLKRQTRSSPVLQHKISETLESRHHKIKTGSPGSEVVTLQQFLEESNKLTSVQIKSSSQENLLDEVMKSLSVSSDFLGKDKPVSCGLARSVSGKTPGDFYDRRTTKPEFLRPGPRKTEDTYFISSAGKPTPGTQGKIKSED

SEQ ID NO: 2398 - DNA, 2071 bp, Homo sapien
ggcacgaggcctgggtcccgtcacatccttcttgctcaaccactgggtgcacaggatggaaacttctattccctctctggaagacagcgcgtggcttggcttcacagagttgtggctggagaccgaagcagcccctttctcaggcttactgtcaccagtctgtctgtgttaggggagaggggagtccgctctgtcctgaaggcccagagatggaaggacaagtggtaggccgggtgttcaggctcttccaacgccgactgcttcaactccgagcaggaccaccccaggacaattcaggggaagctttaaaggaaccagaaagggcccaggagcactctttgcccaactttgctggggggcagcacttctttgaataccttcttgtggtttctctcaaaaagaagcgttcagaggatgattacgagcctataatcacctaccaatttcccaagcgggagaacctgcttcggggtcagcaggaggaggaggagcggctgctcaaagctatccccttgttctgcttcccagatgggaatgagtgggcatcactcaccgagtatcccagggagaccttctccttcgttctgaccaatgtggatgggagcagaaagattggatactgcaggcgcctcttgcctgccggccctggccctcgccttcccaaagtgtactgcatcatcagctgcatcggctgcttcggcttgttctccaagatcctggatgaagtggagaagagacatcagatctccatggctgtcatctacccgttcatgcagggcctccgagaggcagccttccctgctcctgggaagactgtcactctcaagagcttcatccccgactcaggcactgagttcatttcactgacacggcccctggactcccacctagaacatgtggattttagttctctattgcactgtctcagttttgaacagatacttcagatctttgcctctgccgtgctggagagaaaaatcatcttcctggcggaaggtctcagcaccttgtctcagtgcatccatgctgctgccgcactgctctaccccttcagctgggcgcacacctacatccctgttgtccctgagagccttctggccaccgtctgctgccccacccccttcatggttggagtacaaatgcgcttccagcaggaggtcatggacagccctatggaagaggtcctgctggtcaatctttgtgaaggaaccttcttaatgtcggttggtgatgaaaaagacatcctgccaccgaagcttcaggatgacatcttagactctcttggtcaggggatcaatgagttaaagactgcagaacaaatcaacgagcatgtttcaggcccctttgtgcagttctttgtcaagattgtgggccattatgcttcctatatcaagcgggaggcaaatgggcaaggccacttccaagaaagatccttctgtaaggctctgacctccaagaccaaccgccgatttgtgaagaagtttgtgaagacacagctcttctcacttttcatccaggaagccgagaagagcaagaatcctcctgcaggctatttccaacagaaaatacttgaatatgaggaacagaagaaacagaagaaaccaagggaaaaaactgtgaaataagagctgtggtgaataagaatgactagagctacacaccatttctggacttcagcccctgccagtgtggcaggatcagcaaaactgtcagctcccaaaatccatatcctcactctgagtcttggtatccaggtattgcttcaaactggtgtctgagatttggatccctggtattgatttctcaggactttggagggctctgacaccatgctcacagaactgggctcagagctccattttttgcagaggtgacacaggtaggaaacagtagtacatgtgttgtagacacttggttagaagctgctgcaactgccctctcccatcattataacatcttcaacacagaacacactttgtggtcgaaaggctcagcctctctacatgaagtctgtggacatgtaaggacgagagtaaagaggaaaatcttataaaaaaaaaaaaaaaaaaaa

SEQ ID NO: 2399 - protein, 471 aa, Homo sapien
MEGQVVGRVFRLFQRRLLQLRAGPPQDNSGEALKEPERAQEHSLPNFAGGQHFFEYLLVVSLKKKRSEDDYEPIITYQFPKRENLLRGQQEEEERLLKAIPLFCFPDGNEWASLTEYPRETFSFVLTNVDGSRKIGYCRRLLPAGPGPRLPKVYCIISCIGCFGLFSKILDEVEKRHQISMAVIYPFMQGLREAAFPAPGKTVTLKSFIPDSGTEFISLTRPLDSHLEHVDFSSLLHCLSFEQILQIFASAVLERKIIFLAEGLSTLSQCIHAAAALLYPFSWAHTYIPVVPESLLATVCCPTPFMVGVQMRFQQEVMDSPMEEVLLVNLCEGTFLMSVGDEKDILPPKLQDDILDSLGQGINELKTAEQINEHVSGPFVQFFVKIVGHYASYIKREANGQGHFQERSFCKALTSKTNRRFVKKFVKTQLFSLFIQEAEKSKNPPAGYFQQKILEYEEQKKQKKPREKTVK

SEQ ID NO: 2400 - DNA, 2444 bp, Homo sapien
agcaggagggtgggaccaagggtgctgctggaccaaggatgggactgggccaagggtggggctgggaagcatcctgttttgcatgtttgatcaggagctgctgccaagttgtgactttcactttcccttttgggttccagggtatatctcagagcctggagaacgtgtctggttattatgcagatgcacggctggaggtgggatccacacagctcagaacagctggatcttgctcacactctttcaagagaagcttccttggacaaaaggaccctgccttggtgtgagagtgagggcagagggagctggagcaagtagaatttctctaaataccagctggctggggcccaggagattaaaaaacaccgggctaggttggtcttggcatttgctgacacgcaaagggattgcagagatccagcccctccaacctccctctgtccacaggtggctcacattcagtcccacaatttgctttctcctcctcaagggttaagaaaaaaaacgaacccttccagtcaggtcagtgactggagagctccatggaaagtctctcagtgacctggctgctggcaccatggactcagaaaagaaacgctttactgaagaggccaccaaatacttccgggagagagtcagcccagtgcatctgcaaatcctgctgactaacaatgaagcctggaagagattcgtgactgcggctgaattgcccagggatgaggcagatgctctctacgaagctctgaagaagcttagaacatatgcagctattgaggacgaatatgtgcagcagaaagatgagcagtttagggaatggtttttgaaagagtttccccaagtcaagaggaagatccaggagtccatagaaaagcttcgtgcccttgcaaatggtattgaagaggtccacagaggctgcaccatctccaatgtggtgtccagctccactggcgctgcctctggcatcatgtcccttgctggtcttgttttggcaccatttacagcagggacgagtctggcccttactgcagctggggtagggctgggagcagcgtctgctgtgactgggatcaccaccagcatcgtggagcactcatacacatcatcagcagaagctgaagccagcaggctgactgcaaccagcattgaccgattgaaggtatttaaggaagttatgcgtgacatcacacccaacttactttcccttcttaataattattacgaagccacacaaaccattgggagtgaaatccgtgccatcaggcaagccagagccagggcccgactccctgtgaccacctggcgaatctcagctggaagtggtggtcaagcagagagaacgattgcaggcaccacccgggcagtgagcagaggagcccggatcctgagtgcgaccacttcaggcatcttccttgcactggatgtggtcaaccttgtatacgagtcaaagcacttgcatgagggggcaaagtctgcatctgctgaggagctgaggcggcaggctcaggagctggaggagaatctaatggagctcactcagatctatcagcgtctgaatccatgccatacccactgaccccagaccagtgcagccagcaggggaggtgagccatacacaggccacgacaaaatgcaggcattttattagggggataaagagggcaaggtaaagtttatggagctgagtgttagtgactttggcatttctgtagctgagcacagcaggggaggggttaatgcagatggcaagtgcaccaaggagaaggcaggaatgctggagcctggaataagggaggagaggggactggagagtgtggggaataggaagaagaaatttcctttagactaacgaatatattggggggaggaatagaggggaggtgtgcaggaaccagcaatgagaaggccaggaaaagaaagagctgaaaatgcagaaagccgaagagttagaacttttggatacagcagaagaaacagcggctccactaccgacctgcccccggttcgatgtccttccaagaatgaagtctttccctggtgatggtcccctgccctgtctttccagcatccactctgtcttgtcctcctggaagtgtatctcagtcagccagtggcttcttgatgatggcggtggaggtggtggttgtagtgtgatggatcccctttaggttatttaggggtatatgtcccctgcttgaaccctgaaggccaggtaatgagccatggccattgtccccagctgaggaccaggtgtctctaaaaacccaaacatcctggagagtatgcgagaacctaccaagaaaaacagtctcattactcatatacagcaggcaaagagacagaaaattaactgaaaagcagtttagagactgggggaggccggatctctagagccatcctgctgagtgccctgtgtgtaagtcctaataaactcacctactcaccaa

SEQ ID NO: 2401 - protein, 331 aa, Homo sapien
MDSEKKRFTEEATKYFRERVSPVHLQILLTNNEAWKRFVTAAELPRDEADALYEALKKLRTYAAIEDEYVQQKDEQFREWFLKEFPQVKRKIQESIEKLRALANGIEEVHRGCTISNVVSSSTGAASGIMSLAGLVLAPFTAGTSLALTAAGVGLGAASAVTGITTSIVEHSYTSSAEAEASRLTATSIDRLKVFKEVMRDITPNLLSLLNNYYEATQTIGSEIRAIRQARARARLPVTTWRISAGSGGQAERTIAGTTRAVSRGARILSATTSGIFLALDVVNLVYESKHLHEGAKSASAEELRRQAQELEENLMELTQIYQRLNPCHTH

SEQ ID NO: 2402 - DNA, 2289 bp, Homo sapien
tcgcggccgcgtcracgcgtggtagggggcccagagcaagccgaaggcaagcacgatggcgctcaccagccggcccacccgcgccccgtgccgcccggagccccagcgggcgccccgcagccgtgccagcgtcacgctgtagcagccgagcatcagccgaaaggaagcacgaaagcggtcagagtctccaggctcaggtgggcggcggcgtggaccggcgacgggtggcacagctggcatacgcggtccctccacaggtggcggtagacggcggccgggacggcgagcaacagggcggccagccagaccgccagcagcaggcggcgggccagggccgggctgcgcagccgaggcgccaggaaggggcgggtgactgcgaggcagcgctgcaggctgagcaggccggtgagcagcacgcttggcgtacatgctgagcgcgcacacgtagtacaccgccttgcagcccgcctggcccagcggccaggcctgccggtcaggaaggccacaaagagcggcgtgagcagcagcaccgcgccgtcggccagcgccaggtgcagcacaagcgtggccgccagcggtcgcccccgtgcaggctgccagcccgccaagctccacaccacgaagccgttgccaggcagccccagcagcgccgccagcagcaggaaggctgtgcctgtggcccgcgaagtcttccagctcagcagtgtctcgttccctgggggacggtagcagaccgacatccttctgggcctacaggacacagaaaaaaagtggggaagctgggggaccctacaaggatccttggcaggaaagcagggattgtgttcattttgagggtttcactgtcagtgagagtctcagcttccatgcaactgtccatcacggctgcaactgaaatcagagctgggacacagcgcaccagaagctaaagtcttgatgccatcaaaggacatcccctgccccattcacayattcacatctctgtcacgtccactaatcggcaaaaggagaaaagtgagagaagatgacctaagtgtgactgcagcaggcagctctggaaaatgaagccagagcagtgagccagcccctcctccgaccaaggaggaaggaaagagcagccccagcacaggagagaaccacccagcccagaagttccagggaaggaactctccggtccaccatggagtacctctcagctctgaaccccagtgacttactcaggtcagtatctaatataagctcggagtttggacggagggtctggacctcagctccaccaccccagcgacctttccgtgtctgtgatcacaagcggaccatccggaaaggcctgacagctgccacccgccaggagctgctagccaaagcattggagaccctactgctgaatggagtgctaaccctggtgctagaggaggatggaactgcagtggacagtgaggacttcttccagctgctggaggatgacacgtgcctgatggtgttgcagtctggtcagagctggagccctacaaggagtggagtgctgtcatatgggcctggacgggagagccccaagcacagcaaggacatcggccgattcacctttgacgtgtacaagcaaaaccctcgagacctctttggcagcctgaatgtcaaagccacattctacgggctctactctatgagttgtgactttcaaggacttggcccaaagaaagtactcagggagctccttcgttggacctccacactgctgcaaggcctgggccatatgttgctgggaatttcctccacccttcgtcatgcagtggagggggctgagcagtggcagcagaagggccgcctccattcctactaaggggctctgagcttctgcccccagaatcattccaaccgacccactgcaaagactatgacagcatcaaatttcaggacctgcagacagtacaggctagataacccacccaatttccccactgtcctctgatcccctcgtgacagaacctttcagcataacgcctcacatcccaagtctatacccttacctgaagaatgctgttctttcctagccacctttctagcctcccacttgccctgaaaggccaagatcaagatgtcccccaggcatcttgatcccagcctgactgctgctacatctaatcccctaccaatgcctcctgtccctaaactccccagcatactgatgacagccctctctgactttaccttgagatctgtcttcatacccttcccctcaaactaacaaaaacatttccaataaaaatatcaaatatttaccgtcaaccc

SEQ ID NO: 2403 - protein, 219 aa, Homo sapien
MEYLSALNPSDLLRSVSNISSEFGRRVWTSAPPPQRPFRVCDHKRTIRKGLTAATRQELLAKALETLLLNGVLTLVLEEDGTAVDSEDFFQLLEDDTCLMVLQSGQSWSPTRSGVLSYGPGRESPKHSKDIGRFTFDVYKQNPRDLFGSLNVKATFYGLYSMSCDFQGLGPKKVLRELLRWTSTLLQGLGHMLLGISSTLRHAVEGAEQWQQKGRLHSY

SEQ ID NO: 2404 - DNA, 1552 bp, Homo sapien
acttaatgggctcaaggtcacctacctgacctaccagcagctcaatggccttcccaaagaagaaacttcagggtcttgtggctgcaaccatcacgccaatgactgagaatggagaaatcaacttttcagtaattggtcagtatgtggattatcttgtgaaagaacagggagtgaagaacatttttgtgaatggcacaacaggagaaggcctgtccctgagcgtctcagagcgtcgccaggttgcagaggagtgggtgacaaaagggaaggacaagctggatcaggtgataattcacgtaggagcactgagcttgaaggagtcacaggaactggcccaacatgcagcagaaataggagctgatggcatcgctgtcattgcaccgttcttcctcaagccatggaccaaagatatcctgattaatttcctaaaggaagtggctgctgccgcccctgccctgccattttattactatcacattcctgccttgacaggggtaaagattcgtgctgaggagttgttggatgggattctggataagatccccaccttccaagggctgaaattcagtgatacagatctcttagacttcgggcaatgtgttgatcagaatcgccagcaacagtttgctttcctttttggggtggatgagcaactgttgagtgctctggtgatgggagcaactggagcagtgggcagtacctataactacctgggaaaaaagacaaaccagatgttggaggcttttgaacaaaaggacttctctttagccctgaactatcagttttgtatccagagatttatcaactttgttgtcaaactaggttttggagtgtcacagaccaaagccatcatgactctggtctctgggattccaatgggcccaccccggcttccactgcagaaagcctccagggagtttactgatagtgctgaagctaaactgaagagcctggatttcctttctttcactgatttaaaggatggaaacttggaagctggtagctagtgcctctctatcaaatcagggtttgcaccttgagacataatctaccttaaatagtgcatttttttctcagggaattttagatgaacttgaataaactctcctagcaaatgaaatctcacaataagcattgaggtaccttttgtgagccttaaaaagtcttattttgtgaaggggcaaaaactctaggagtcacaactctcagtcattcatttcacagatttttttgtggagaaatttctgtttatatggatgaaatggaatcaagaggaaaattgtaattgattaattccatctgtctttaggagctctcattatctcggtctctggttcctaatcctattttaaagttgtctaattttaaaccactataatatgtcttcattttaataaatattcatttggaatctaggaaaactctgagctactgcatttaggcaggcactttaataccaaactgtaacatgtctcaactgtatacaactcaaaatacaccagctcatttggctgctcagtctaactctagaatggatgcttttgaattcatt

SEQ ID NO: 2405 - protein, 320 aa, Homo sapien
MAFPKKKLQGLVAATITPMTENGEINFSVIGQYVDYLVKEQGVKNIFVNGTTGEGLSLSVSERRQVAEEWVTKGKDKLDQVIIHVGALSLKESQELAQHAAEIGADGIAVIAPFFLKPWTKDILINFLKEVAAAAPALPFYYYHIPALTGVKIRAEELLDGILDKIPTFQGLKFSDTDLLDFGQCVDQNRQQQFAFLFGVDEQLLSALVMGATGAVGSTYNYLGKKTNQMLEAFEQKDFSLALNYQFCIQRFINFVVKLGFGVSQTKAIMTLVSGIPMGPPRLPLQKASREFTDSAEAKLKSLDFLSFTDLKDGNLEAGS

SEQ ID NO: 2406 - DNA, 2095 bp, Homo sapien
ggatgaaagtgatttaattcatttttagaattttttttttgttttgttttagcaacatgctgaacaactaatttactttaaaaataagccagttaaaacaaaggacgctaagcccaagtggggggcaatattagtcaggatctttggggtctaattccagaccaactttcagaagcacttctttgtctctgttctcacctctgctgtccctctcttccctcatcccctaagagagacaaagataaaagcccacctgcatccctaagtcttactgagatcagccaccccaggggagagaaactggatctacttacagccaccccctgtttccatccatatacttacttcccccaatttgcatgtgattatggaaacaagtcatgctcatgaaagcaactgtaaaataaaaggttatggagtagttcagcaacttcttcacagccagctttgtggagctggggaggacttagggcccattggagtctcttatgtgtacagcttcagggctgtccctttcagtttgattttaagcaatgcctcacttcatagcttagggggtaaggattccattcaggtaggttgtctaaaggaactaatgggacctctcagtgaattagctgaccagattttaggaaatctttttaatttctatgattttccttctcacattttgaaatggtaaaattgactggaaataatttttcttggtgccttattggttttccttgcaaacctttctcatattttctcatgaccattgccagtgaccaaggcccatgtgtgtgttgtgtgtaattgtgggcatgtacaagcttaaataacgtgccgacagcactgtttcaaagttggtattcattaggctgttgcctcctgggctggagctgcgctaatcctgacaccggctgccaggagaaaacctcatggatcacacaccaaaccttaataacagcatccgtgacctgcactctccagtacagaatgggaaccccagagctaggaaatgtagttgtatattttaatgaactgctaccccagccaaagaagcttctttcacttttgtgctctacagaaagcccaaggggggtaggagggacagagctttgaataactgctttctaacactaaatgtggccaacaggacagagcacatcacacgtataggcaggtgtgagggacagtggctaagaattgcctgctccctctgcatgctctttcttgtttccaaagtccaatcaagtgatcctgggaaacaaatctgtctggattgcggagggtggttctgaaagaactgccaagacgttaaagaagggtgaagagtaggcagaatataagtagctaacctgagtcaagactctcaaaagctagcagcctgatgacaataggatttatttcagccaggatagtgtctgtctgtgagtgcatcattttaagacagtatgacttcatgttgttacaaactatgtatagtatgtatgttttgtgggttgtatatatacataatatatattatatatatatatgagagatttggtgacttttgatacgggtttggtgcaggtgaatttattactgagccaaatgaggcacataccgagtcagtagttgaagtccagggcattcgatactgtttatgatttccatatatgtatagtgcctatcccatgctgtagtcactgttatgttaaatccagaagttacactagagccagcgatactttatttgtagacaatcaatttgaatccatatgttattactggcagatgatacatgattacagttctgaatctgtaacacttacaaaaggaaacccagagcagcttgatgagtttttgtttctgcttcgttcctgggagtcagtagaaacagcagttgtatgtggttatgttagtctcaagatacttaatttgttgaccttacttcagaaaaattttgtatgtattatatttgtgggaaggtaaaataatcatttgagatttttatcaaatatgaagattagttatttatgaaaaacaaagaaatgtctatttttctttgttcccaattaatgtagataaattttaaaatgcattaaagtaatggtccggaaaaaaaaaa

SEQ ID NO: 2407 - protein, 104 aa, Homo sapien
METSHAHESNCKIKGYGVVQQLLHSQLCGAGEDLGPIGVSYVYSFRAVPFSLILSNASLHSLGGKDSIQVGCLKELMGPLSELADQILGNLFNFYDFPSHILKW

SEQ ID NO: 2408 - DNA, 7267 bp, Homo sapien
ctgctccttgcaccccgctccctgcctggacacaggctcactcgctgccttcttctgggggaaaccagcttcttgccagccacagctgctgcctccgccactggccaccgcccctgtcctgggagtcccttggcccagacacccacctgacttagtggctcctctgcaggaaaggtggctgccccctgcgttcctccatccaaccatgagctggtgcccatcaccactgagaatgcaccaaagaatgtagtggacaagggagaaggagcctcccggggtggaaacacacggaaaagcctcgaggacaacggctccaccagggtcaccccgagtgtccagccccacctccagcccatcagaaacatgagtgtgagccggaccatggaggacagctgtgagctggacctggtgtacgtcacagagaggatcatcgctgtctccttccccagcacagccaatgaggagaacttccggagcaacctccgtgaggtggcgcagatgctcaagtccaaacatggaggcaactacctgctgttcaacctctctgagcggagacctgacatcacgaagctccatgccaaggtactggaatttggctggcccgacctccacaccccagccctggagaagatctgcagcatctgtaaggccatggacacatggctcaatgcagaccctcacaatgtcgttgttctacacaacaagggaaaccgaggcaggataggagttgtcatcgcggcttacatgcactacagcaacatttctgccagtgcggaccaggctctggaccggtttgcaatgaagcggttctatgaggataagattgtgcccattggccagccatcccaaagaaggtacgtgcattacttcagtggcctgctctccggctccatcaaaatgaacaacaagcccttgtttctgcaccacgtgatcatgcacggcatccccaactttgagtctaaaggaggatgtcggccatttctccgcatctaccaggccatgcaacctgtgtacacatctggcatctacaacatcccaggagacagccagactagcgtctgcatcaccatcgagccaggactgctcttgaagggagacatcttgctgaagtgctaccacaagaagttccgaagcccagcccgagacgtcatcttccgtgtgcagttccacacctgtgccatccatgacctgggggttgtctttgggaaggaggaccttgatgatgctttcaaagatgatcgatttccagagtatggcaaagtggagtttgtattttcttatgggccagagaaaattcaaggcatggagcacctggagaacgggccgagcgtgtctgtggactataacacctctgaccccctcatccgctgggactcctacgacaacttcagtgggcatcgagatgacggcatggaggaggtggtgggacacacgcaggggccactagatgggagcctgtatgctaaggtgaagaagaaagactccctgcacggcagcaccggggctgttaatgccacacgtcctacactgtcggccacccccaaccacgtggaacacacgctttctgtgagcagcgactcgggcaactccacagcctccaccaagaccgacaagaccgacgagcctgtccccggggcctccagtgccactgctgccttgagtccccaggagaagcgggagctggaccgcctgctgagtggctttggcttagagcgagagaagcaaggcgccatgtaccacacccagcacctcaggtcccgcccagcagggggctcggctgtgccctcctctggacgccacgttgtcccagcccaggttcatgtcaatggtggggcgttagcatctgagcgggagacagacatcctggacgatgaattgccaaaccaggatggtcacagtgcgggcagcatgggcacactctcttctctggacggggtcaccaacaccagtgaggggggctacccagaggccctgtccccactgaccaacggtctggacaagtcctaccccatggagcctatggtcaatggaggaggctacccctacgagtctgccagccgggcggggcctgcccatgctggccacacggcccccatgcggccctcctactctgcacaggagggtttagctggctaccagagggaggggccccacccagcctggccacagccagtgaccacctcccactatgcccatgaccccagcggtatgttccgctctcaatccttttcggaagctgaaccccagctgcccccagctccggtccgagggggaagcagccgggaggctgtgcaaaggggactgaattcatggcagcagcagcagcagcagcagcagcagcctcgcccacctccacgccagcaggaaagagcccacttggagagtcttgtagccagcaggcccagccctcagccattggcagagacccccatccccagtctccctgagttcccgcgagcagcctcccagcaggagattgaacagtccatcgaaacactcaatatgctgatgctggacctggagccagcctccgctgctgccccactacacaagtcccagagtgtccccggggcctggccaggggcttctccactctcctcccagcccctctctggatcctcccgtcagtcccatccactgacccagtccagatctggctatatccccagtgggcattcgttgggaacccctgagccagccccacgggcctctctggagtctgtccctcctggcaggtcttactcaccttatgactatcagccatgtttggctgggcctaaccaggatttccattcaaagagcccagcctcttcctccttgcctgccttccttccgaccacccacagccctccagggcctcagcaacccccagcctctctccctggcctcactgctcagcctctgctctcaccaaaggaagcgacttcagacccctcccggactccagaggaggagccattgaatttagaagggctggtggcccacagggtagcaggggtacaggctcgggagaagcagcctgcagagcccccagcccctctgcggaggcgggcggccagtgatggacagtatgagaaccagtctccagaagccacatcccctcgtagccctggggttcgctcccctgtccagtgtgtctccccggagctggctcttaccatcgctctcaatcctggagggcggcccaaagagccccatttgcacagctacaaggaggccttcgaggagatggagggaacctccccgagcagcccaccacccagtggggtgcggtcccccccgggtctggccaagacacccctgtctgctctgggcctgaaacctcacaacccagcggacatcctgttgcaccccacaggagttaccagaagacggatccagccagaggaagatgaggggaaggtggtggtcaggctgtcagaagagccccggagctatgtggagtctgtggcacggacagcggtggctggaccccgagctcaggactctgagcccaagagctttagtgctccagccacccaggcctatggccatgagatacccctgaggaacgggaccctgggtggctcctttgtctcccccagccccctctccaccagcagccccatcctcagtgctgacagcacttcagtggggagtttcccgtcgggagagagcagtgaccagggtccccggacgcccacccagcctctgttggagtctggcttccgctcaggcagcctgggacagcccagcccgtctgcccagagaaactaccagagctcttctcctctcccgactgtgggcagtagctacagcagccccgactactcacttcagcatttcagctcctctccggaaagccaggctcgagctcagttcagtgtggctggcgtccacacggtgcctgggagccctcaggcgcgccacagaacagtgggcaccaacactccccctagtcctggcttcggctggcgggccatcaatcccagcatggctgcccccagcagtcccagtttgagccatcaccagatgatgggtccaccaggcactggcttccatggtagcactgtctccagcccccagagcagtgcagcgaccaccccggggagccccagcctgtgtcggcacccagcaggggtctaccaggtttctggcctccacaacaaagtggccaccaccccggggagtcccagcctgggccggcaccctggggctcaccaaggcaacctggcctccggtcttcatagcaatgcaatagccagccctggaagccccagcctgggccgtcacctcggagggtctggatctgtggttcccggcagcccctgcttggaccggcatgtggcctatggcggctattctaccccggaggatcggagacccacactgtcccggcagagcagtgcctctggctaccaggctccttccacgccctccttccctgtctcccctgcctactaccctggcctgagcagccctgccacctccccgtcaccagactccgcagccttccggcaagggagcccaacaccagccttgccagagaagcgaaggatgtcagtgggagaccgggcaggcagcctccccaactatgccaccatcaatgggaaggtgtcttcgcctgtcgccagcggcatgtccagtcccagcgggggcagcaccgtctccttctcccacactctgcccgacttctccaagtactccatgccagacaacagcccggagacgcgggctaaagtgaagtttgtccaggacacttctaagtattggtacaagcctgagatctccagggagcaggccatcgcgctcctcaaggaccaggagccgggggccttcatcatccgcgacagtcactccttccgaggcgcgtacgggctggccatgaaggtgtcttcgccacctccaaccatcatgcagcagaataaaaaaggagacatgacccatgagctggtcaggcattttctgatagagactggccccagaggagtcaagctcaagggctgccccaatgagccaaacttcggatcgctgtctgccctggtctaccagcactccatcatcccattggccctgccttgcaagctggtcattccaaaccgagaccccacagatgaatcgaaagatagctccggccctgccaactcaactgcagacctgctgaaacaaggggcagcctgcaatgtgctcttcatcaactctgtggacatggagtcactcactgggccacaggccatctctaaagccacatctgagacgttggctgcagaccccacgccagctgccaccatcgttcacttcaaagtctctgcccagggaatcactctgactgacaaccagagaaagctctttttcagacgccactaccctctcaacactgtcaccttctgtgacctggatccacaggaaagaaagtggatgaaaacagagggtggtgcccctgctaagctcttcggcttcgtggcccggaagcagggcagcaccacggacaacgcctgccacctctttgctgagcttgaccccaaccagccggcctctgccatcgtcaacttcgtctccaaggtcatgctgaatgccggccaaaagagatgaaccctgccccttgcccagggccagtgccatggggaaggggcttgtggggaggggacccatgaatcctgaccactcttgaacccagaaggaggactttgggccaatttcggaggagagaagaaagtgcaacgtggggagagggaagtgaattgcagaggggagggggaaaagagagagagagagagagagagagagagagagagagagaaagatggaggagaagaacttggattcccctgggtagatggaaactgcaaaaacccaaagcctccaaaactaaccaggtccacctaacaccccctccctcccctaagaagatggatgtcctcaaaagagaaggaacaaacctccttgggaatccacattttttgggggaatggaaaagctctgtctccctaactcaactgctttgcaaggggaaatcaagctgggagaatctttttctggccacctgtagggtaggttgtcaaaccaaacagagccaccgtgggacatcaagtggaagaacttgtttgcttgaaagtatctcagacccaaggcacctcaggtctctttgctgtgcctccactatattgtcgtgtgggtgtgtgtctgcacccacatcctcacacattgatctagatctgcctttatccactcgaattataaacagctcggcttgtccttgtcccatgtgtttgtagacacacatgcatactgtccaaagattagggttggtggtggcagtgcagcaggggagggacaaacaaccaagctatgggtgacagaggctctctcctggtgcctgcacctgcactctagtgaccctgggtgccgccagacccttctcttctacaaagaccccagcaggagtgggagggtctgcaatggcatcgccctgtcctgccttggccagaagcctggagctttggtttgaggaggtagagatatgtgtatccataggaagagatctgtcagaacaggcagctgttgagctcggggtgtcttccccaaggcatgtggctcagcagcaagaaaggcaagttgctcctgctggggccctggactctgccttagctcccacctctcagccttgttattgggtttcatgcccctggaccagccttatctcagacctgcttacctgcatgatgcctttttgggggctggggattgagtcttgctgctctgcccagccctgttctattctgcagggtccctgtgttggaattctccctggggaacctactttctgctcagtgaggctccggccagaaacctggagtccttatcctcccctctgtaagtgttttagggtctggcttttgcaggcaccctctgacctcagcagagctcctgggcctgctgcctgcacaccacatcgcctacctacaatgccaaagcctcactgtcaccctttctgccttggtttccctagctgagccacgctgcccatgcagcagagggcagaaggcttgcacttgggccaaagggcctaaggtccactggacagttgggaaaacacctgaccaccatttaaggactctaagccagaatggaaaattcaccaggactccattcttaagcctatgcgagtcccctagagagaggcattgtactgatatataaatattatataatatatacatgagacatactgacagaatctgtaagctaataaaatgtaagaaaaggttaaaaaaagaaaaaaaaaaaa

SEQ ID NO: 2409 - protein, 1735 aa, Homo sapien
MSVSRTMEDSCELDLVYVTERIIAVSFPSTANEENFRSNLREVAQMLKSKHGGNYLLFNLSERRPDITKLHAKVLEFGWPDLHTPALEKICSICKAMDTWLNADPHNVVVLHNKGNRGRIGVVIAAYMHYSNISASADQALDRFAMKRFYEDKIVPIGQPSQRRYVHYFSGLLSGSIKMNNKPLFLHHVIMHGIPNFESKGGCRPFLRIYQAMQPVYTSGIYNIPGDSQTSVCITIEPGLLLKGDILLKCYHKKFRSPARDVIFRVQFHTCAIHDLGVVFGKEDLDDAFKDDRFPEYGKVEFVFSYGPEKIQGMEHLENGPSVSVDYNTSDPLIRWDSYDNFSGHRDDGMEEVVGHTQGPLDGSLYAKVKKKDSLHGSTGAVNATRPTLSATPNHVEHTLSVSSDSGNSTASTKTDKTDEPVPGASSATAALSPQEKRELDRLLSGFGLEREKQGAMYHTQHLRSRPAGGSAVPSSGRHVVPAQVHVNGGALASERETDILDDELPNQDGHSAGSMGTLSSLDGVTNTSEGGYPEALSPLTNGLDKSYPMEPMVNGGGYPYESASRAGPAHAGHTAPMRPSYSAQEGLAGYQREGPHPAWPQPVTTSHYAHDPSGMFRSQSFSEAEPQLPPAPVRGGSSREAVQRGLNSWQQQQQQQQQPRPPPRQQERAHLESLVASRPSPQPLAETPIPSLPEFPRAASQQEIEQSIETLNMLMLDLEPASAAAPLHKSQSVPGAWPGASPLSSQPLSGSSRQSHPLTQSRSGYIPSGHSLGTPEPAPRASLESVPPGRSYSPYDYQPCLAGPNQDFHSKSPASSSLPAFLPTTHSPPGPQQPPASLPGLTAQPLLSPKEATSDPSRTPEEEPLNLEGLVAHRVAGVQAREKQPAEPPAPLRRRAASDGQYENQSPEATSPRSPGVRSPVQCVSPELALTIALNPGGRPKEPHLHSYKEAFEEMEGTSPSSPPPSGVRSPPGLAKTPLSALGLKPHNPADILLHPTGVTRRRIQPEEDEGKVVVRLSEEPRSYVESVARTAVAGPRAQDSEPKSFSAPATQAYGHEIPLRNGTLGGSFVSPSPLSTSSPILSADSTSVGSFPSGESSDQGPRTPTQPLLESGFRSGSLGQPSPSAQRNYQSSSPLPTVGSSYSSPDYSLQHFSSSPESQARAQFSVAGVHTVPGSPQARHRTVGTNTPPSPGFGWRAINPSMAAPSSPSLSHHQMMGPPGTGFHGSTVSSPQSSAATTPGSPSLCRHPAGVYQVSGLHNKVATTPGSPSLGRHPGAHQGNLASGLHSNAIASPGSPSLGRHLGGSGSVVPGSPCLDRHVAYGGYSTPEDRRPTLSRQSSASGYQAPSTPSFPVSPAYYPGLSSPATSPSPDSAAFRQGSPTPALPEKRRMSVGDRAGSLPNYATINGKVSSPVASGMSSPSGGSTVSFSHTLPDFSKYSMPDNSPETRAKVKFVQDTSKYWYKPEISREQAIALLKDQEPGAFIIRDSHSFRGAYGLAMKVSSPPPTIMQQNKKGDMTHELVRHFLIETGPRGVKLKGCPNEPNFGSLSALVYQHSIIPLALPCKLVIPNRDPTDESKDSSGPANSTADLLKQGAACNVLFINSVDMESLTGPQAISKATSETLAADPTPAATIVHFKVSAQGITLTDNQRKLFFRRHYPLNTVTFCDLDPQERKWMKTEGGAPAKLFGFVARKQGSTTDNACHLFAELDPNQPASAIVNFVSKVMLNAGQKR

SEQ ID NO: 2410 - DNA, 2712 bp, Homo sapien
gtcatgttcttcgcgccctggtgtggacactgccagcggctgcagccgacttggaatgacctgggagacaaatacaacagcatggaagatgccaaagtctatgtggctaaagtggactgcacggcccactccgacgtgtgctccgcccagggggtgcgaggataccccaccttaaagcttttcaagccaggccaagaagctgtgaagtaccagggtcctcgggacttccagacactggaaaactggatgctgcagacactgaacgaggagccagtgacaccagagccggaagtggaaccgcccagtgcccccgagctcaagcaagggctgtatgagctctcagcaagcaactttgagctgcacgttgcacaaggcgaccactttatcaagttcttcgctccgtggtgtggtcactgcaaagccctggctccaacctgggagcagctggctctgggccttgaacattccgaaactgtcaagattggcaaggttgattgtacacagcactatgaactctgctccggaaaccaggttcgtggctatcccactcttctctggttccgagatgggaaaaaggtggatcagtacaagggaaagcgggatttggagtcactgagggagtacgtggagtcgcagctgcagcgcacagagactggagcgacggagaccgtcacgccctcagaggccccggtgctggcagctgagcccgaggctgacaagggcactgtgttggcactcactgaaaataacttcgatgacaccattgcagaaggaataaccttcatcaagttttatgctccatggtgtggtcattgtaagactctggctcctacttgggaggaactctctaaaaaggaattccctggtctggcgggggtcaagatcgccgaagtagactgcactgctgaacggaatatctgcagcaagtattcggtacgaggctaccccacgttattgcttttccgaggagggaagaaagtcagtgagcacagtggaggcagagaccttgactcgttacaccgctttgtcctgagccaagcgaaagacgaactttaggaacacagttggaggtcacctctcctgcccagctcccgcaccctgcgtttaggagttcagtcccacagaggccactgggttcccagtggtggctgttcagaaagcagaacatactaagcgtgaggtatcttctttgtgtgtgtgttttccaagccaacacactctacagattctttattaaatgtgtaactcatggtcactgtgtaaacattttcagtggcgatatatcccctttgaccttctcttgatgaaatttacatggtttcctttgagactaaaatagcgttgagggaaatgaaattgctggactatttgtggctcctgagttgagtgattttggtgaaagaaagcacatccaaagcatagtttacctgcccacgagttctggaaaggtggccttgtggcagtattgacgttcctctgatcttaaggtcacagttgactcaatactgtgttggtccgtagcatggagcagattgaaatgcaaaaacccacacctctggaagataccttcacggccgctgctggagcttctgttgctgtgaatacttctctcagtgtgagaggttagccgtgatgaaagcagcgttacttctgaccgtgcctgagtaagagaatgctgatgccataactttatgtgtcgatacttgtcaaatcagttactgttcaggggatccttctgtttctcacggggtgaaacatgtctttagttcctcatgttaacacgaagccagagcccacatgaactgttggatgtcttccttagaaagggtaggcatggaaaattccacgaggctcattctcagtatctcattaactcattgaaagattccagttgtatttgtcacctggggtgacaagaccagacaggctttcccaggcctgggtatccagggaggctctgcagccctgctgaagggccctaactagagttctagagtttctgattctgtttctcagtagtccttttagaggcttgctatacttggtctgcttcaaggaggtcgaccttctaatgtatgaagaatgggatgcatttgatctcaagaccaaagacagatgtcagtgggctgctctggccctggtgtgcacggctgtggcagctgttgatgccagtgtcctctaactcatgctgtccttgtgattaaacacctctatctcccttgggaataagcacatacaggcttaagctctaagatagataggtgtttgtccttttaccatcgagctacttcccataataaccactttgcatccaacactcttcacccacctcccatacgcaaggggatgtggatacttggcccaaagtaactggtggtaggaatcttagaaacaagaccacttatactgtctgtctgaggcagaagataacagcagcatctcgaccagcctctgccttaaaggaaatctttattaatcacgtatggttcacagataattctttttttaaaaaaacccaacctcctagagaagcacaactgtcaagagtcttgtacacacaacttcagctttgcatcacgagtcttgtattccaagaaaatcaaagtggtacaatttgtttgtttacactatgatactttctaaataaactctttttttttaaaaaaaaaaaaaaaaaaaaaaaaaaaaaaaaaaaaaaaaaaaaaaaaaaac

SEQ ID NO: 2411 - protein, 324 aa, Homo sapien
MEDAKVYVAKVDCTAHSDVCSAQGVRGYPTLKLFKPGQEAVKYQGPRDFQTLENWMLQTLNEEPVTPEPEVEPPSAPELKQGLYELSASNFELHVAQGDHFIKFFAPWCGHCKALAPTWEQLALGLEHSETVKIGKVDCTQHYELCSGNQVRGYPTLLWFRDGKKVDQYKGKRDLESLREYVESQLQRTETGATETVTPSEAPVLAAEPEADKGTVLALTENNFDDTIAEGITFIKFYAPWCGHCKTLAPTWEELSKKEFPGLAGVKIAEVDCTAERNICSKYSVRGYPTLLLFRGGKKVSEHSGGRDLDSLHRFVLSQAKDEL

SEQ ID NO: 2412 - DNA, 1974 bp, Homo sapien
tggcatttctgcattcgaagaagaatctgagagaaacctgacgcagggagcatgggtatctggacctcaggcactgatatcttcctaagtctttgggagatttacgtgtctccaagaagccccggatggatggactttatccagcatttgggagtttgctgtttggttgctcttatttcagtgggcctcctgtctgtggccgcctgctggtttctgccatcaatcatagcggccgctgcctcctggattatcacgtgtgttctgctgtgttgctccaagcatgcacgatgttttattcttcttgtctttctctcttgtggcctgcgtgaaggcaggaatgctttgattgcagctggcacagggatcgtcatcttgggacacgtagaaaatatttttcacaactttaaaggtctcctagatggtatgacttgcaacctaagggcaaagagcttttccatacattttccacttttgaaaaaatatattgaggcaattcagtggatttatggccttgccactccactaagtgtatttgatgaccttgtttcttggaaccagaccctggcagtctctcttttcagtcccagccatgtcctggaggcacagctaaatgacagcaaaggggaagtcctgagcgtcttgtaccagatggcaacaaccacagaggtgttgtcctccctgggtcagaagctacttgcctttgcagggctttcgctcgtcctgcttggcactggcctcttcatgaagcgatttttgggcccttgtggttggaagtatgaaaacatctacatcaccagacaatttgttcagtttgatgaaagggagagacatcaacagaggccctgtgtgctcccgctgaataaggaggaaaggaggaagtatgtcatcatcccgactttctggccgactcctaaagaaaggaaaaacctggggctgtttttcctccccatacttatccatctctgcatctgggtgctgtttgcagctgtagattatctgctgtatcggctcattttctcagtgagcaagcagtttcaaagcttgccagggtttgaggttcacttgaaactgcacggagagaaacaaggaactcaagatattatccatgattcttcctttaatatatctgtgtttgaacccaactgtatcccaaaaccaaaattccttctatctgagacctgggttcctctcagtgttattcttttgatattagtgatgctgggactgttgtcctctatccttatgcaacttaaaatcctggtgtcagcatctttctaccccagcgtggagaggaagcgcatccaatatctgcatgcaaagctgcttaaaaaaagatcaaagcagccgctgggagaagtcaaaagacggctgagtctctatcttacaaagattcatttctggcttccagtcctgaaaatgattaggaagaagcaaatggacatggcaagtgcagacaagtcatgagagaccccgactactcctcagccacatcgcaccaacaattctcttcaggtctaggatggcagtcactattcatgccggataatagagaactatgtgacgcagtcctctcaggagtctgagtttacagagccaacttgcagcacctggttatgcctcctttcatctcaaagccaaagagctgccaggtaaatggttatgtggtctatgttccaaacaaaccacatgatcttgcctgtgtcacaatgtaacaagactctagctgggtcccctggtgatgagtttcagcatagaataatgttcaaggaaaagaaaacgaaaacagtttaaatctctaccacagcctcacaagcaaatgctaaggggaacatacatgtaaaaagccagcaaactatcttcaaactcttccgtccttaatgtcttccatggctattgcccccacaatggtctcttttctccctgctcccttattaaagaactctttctgaaaccctttttttttttttttttttt

SEQ ID NO: 2413 - protein, 470 aa, Homo sapien
MGIWTSGTDIFLSLWEIYVSPRSPGWMDFIQHLGVCCLVALISVGLLSVAACWFLPSIIAAAASWIITCVLLCCSKHARCFILLVFLSCGLREGRNALIAAGTGIVILGHVENIFHNFKGLLDGMTCNLRAKSFSIHFPLLKKYIEAIQWIYGLATPLSVFDDLVSWNQTLAVSLFSPSHVLEAQLNDSKGEVLSVLYQMATTTEVLSSLGQKLLAFAGLSLVLLGTGLFMKRFLGPCGWKYENIYITRQFVQFDERERHQQRPCVLPLNKEERRKYVIIPTFWPTPKERKNLGLFFLPILIHLCIWVLFAAVDYLLYRLIFSVSKQFQSLPGFEVHLKLHGEKQGTQDIIHDSSFNISVFEPNCIPKPKFLLSETWVPLSVILLILVMLGLLSSILMQLKILVSASFYPSVERKRIQYLHAKLLKKRSKQPLGEVKRRLSLYLTKIHFWLPVLKMIRKKQMDMASADKS

SEQ ID NO: 2414 - DNA, 891 bp, Homo sapien
cctgggccagcatggcggcgcccatgtaacccggtccgtgccgcaaagcgaacggcggccgcggcgcgggccccgcgggggttagaggtcaccatgctgagggtcgcgtggaggacgctgagtttgattcggacccgggcagttacccaggtcctagtacccgggctgccgggcggtgggagcgccaagtttcctttcaaccagtggggcctgcagcctcgaagtctcctcctccaggccgcgcgcggatatgtcgtccggaaaccagcccagtctaggctggatgatgacccacctccttctacgctgctcaaagactaccagaatgtccctggaattgagaaggttgatgatgtcgtgaaaagactcttgtctttggaaatggccaacaagaaggagatgctaaaaatcaagcaagaacagtttatgaagaagattgttgcaaacccagaggacaccagatccctggaggctcgaattattgccttgtctgtcaagatccgcagttatgaagaacacttggagaaacatcgaaaggacaaagcccacaaacgctatctgctaatgagcattgaccagaggaaaaagatgctcaaaaacctccgtaacaccaactatgatgtctttgagaagatatgctgggggctgggaattgagtacaccttcccccctctgtattaccgaagagcccaccgccgattcgtgaccaagaaggctctgtgcattcgggttttccaggagactcaaaagctgaagaagcgaagaagagccttaaaggctgcagcagcagcccaaaaacaagcaaagcggaggaacccagacagccctgccaaagccataccaaagacactcaaagacagccaataaattctgttcaatcattaaaaaaaa

SEQ ID NO: 2415 - protein, 257 aa, Homo sapien
MLRVAWRTLSLIRTRAVTQVLVPGLPGGGSAKFPFNQWGLQPRSLLLQAARGYVVRKPAQSRLDDDPPPSTLLKDYQNVPGIEKVDDVVKRLLSLEMANKKEMLKIKQEQFMKKIVANPEDTRSLEARIIALSVKIRSYEEHLEKHRKDKAHKRYLLMSIDQRKKMLKNLRNTNYDVFEKICWGLGIEYTFPPLYYRRAHRRFVTKKALCIRVFQETQKLKKRRRALKAAAAAQKQAKRRNPDSPAKAIPKTLKDSQ

SEQ ID NO: 2416 - DNA, 5171 bp, Homo sapien
  Unsure 1099: Unknown base
ggcacgagcgcgggcggaggcggcccggcgggccctgggagagctgggacgggcggcggccgggtggcctcggccacccgctaattgcatcttttcccggcgtctcgtctgcagagggagcactatgtctgcggaagtccccgaggcagcctccgcggaggagcagaaggaaatggaagataaagtgactagtccagagaaagcagaagaagcaaaattaaaagcaagatatcctcatctgggacaaaagcctggaggttcagatttcttaaggaaacggttgcagaaagggcaaaaatattttgattctggggattacaacatggctaaagcaaaaatgaagaacaagcaacttcctactgcagctccggataagacggaggtcactggtgaccacattcccactccgcaagaccttcctcaacggaagccgtcccttgttgctagcaagctggctggctgattaagaagctgaactgcatgaatctgctaaatctcattatttctccttaatatgttacttatctactttttatttcctttcattcactagtcatttgagactgacagctttgcaggtagcagtagtgtgtgctgctattgtggaatatacgtgtgtagagtttttgattagtttaacagtgcactggtgaagaggacatgttagagcaacataagtaaactacttgaaaatagttgtatatattacctaacttctagtgtagtactggttctaacaagtaacaagcaagttttaaaattttaatgttttggctttcattacttcatcttaattatagctttgtatgttactcttatttaatataatctctattgtattgatttcttctgtatttaccttttggattttgtaaaacagaagtttaagaccacaagttagaagaaaggtcacatatttcaaacacaactagatggggctctgaaagatttgtatctctgtgcttgaacttgaatggccttaaacctgtttcagctttaacagtagaattttacttgggcaatatttgcccattctggtgtaacttatgtgactctagtgcttaacagctgccgttgaagctaatattcagttctgtanagttagaataccttttgttgttgaagatgtgaatgaagtatgccatgtgcattaactgtttgaattcacttttgtgccatttttgtaaatacagtagttttgcacaacctctcacaaatgtctgtattaatttcacatacttaaaaagtagataatgtgccaaccagaagcacaagagttcctacacaaaactctgtaaatcattatagcttttgtataataagagtagtttacaatctcgggcttatagaataccaaactgaaatcttagttcaatctgccatagacttaagcttttcatttgttactaatatccatgacattcagtggccttgtgcaaatacgatatgttgcttaggcatatcttttgtcctatgcagaacctttcattttgatttttatgaaagttgcaattcatgtaatttatataaactttttaaatgtagaaactttttacttccacactcagttttggagaccctagaataaaaggcttcaatactctgcattccatgccctctgccacctgcttttttttcccctttgttctttgactcaaatggtattgagctgtttgttgtatatggaagcataggtgtctatatccttactcttttatataacacaataatggcgttttccttctaatttctcagttgttaacttctttctcttttttttttaggatagggccttgctctgtcacctgagctctagtgcagtagtgcaatcacagctcactgcaaccttactcctaggctcaagttaactattcttgatcctttattattactaatattctacaattgtttaaataaaaggaactttataatgaaacggttcggaatactggctcaagaacctatgtcaagatgagctgaattttggtaaattattttaggaattatgacaagctaattgaattaggcttgtgacaattagagtaatttacatgacaggtaaaactcctattaaaaatgtttagatgtttgcttctgtagatgtcactttagtaaaataccaatttagttttacttgtggcttatctagttagaacttagcagactttactgggacaagtttactgctcttgtaggagctcctctcacaagtagttgtaatgctgtagcatgatactcaggatcagtagcttgagatgttactatttttctcttcatctttgacttgcagagagcctcccgtttttggatccaggcatcttttctgaatcctggttccatcagtatacctgctctcctatgaccccaaatcatagtcaatggtgcctcaaacatagcaccttaagttaaaggctgcctagtgctctgaggaaagcttgctgattatcttcctgatctactcaccccaaaaggcagaaaagcaacacagtcactgctgtggtcatttgtaatgtaaagatcagttatatatatatatttgtaatgagagcaagtatatactcattatagaatcaatttaagaagtttaaaataacccagagtagaatttctatatctagtcttggtttttttcatgaatatttgcaagtaattaccattaaattcacacatgaaagattaatctgaaagatcagagaccatgttattcctgaccacgatagaactgctcctgtggtttgggacaagtaataaaacaactgcttgagttttgtttgtaaaatacataattaatatttgacctacctcaaaatgtattgaggatctgtgaaatgctaagtgcccaaaataaaatattgctgattgtctttttattaaaagtaaatttcctcattaagccaacctgccttctgtaagtcacagtgcttaaatctcaggatttttcattaggagagacctgtcgttaaggatttgtaggtataattgcttagcctccattattggtgcttgggatagagaggttttagatttttgttttttttttgttctgcctcaaagctcagtttattgaagacatttgtaagctattggatcatcacttgaatcaagattttgactagtgagcttaattgtccatttcttacaatttcaaagttacagtctcagaaatggttaattttaataactgtcctatcataaattaatgttggaataaattgaagttgttgataaatacttcatgaaaactaaagtctgaaataaattacttgttttatgtccaatagctactacatttgatagaacagttttgaggaacatttcattcttgaacgcagcatctgacatggttctcagcaagttggaatagtaaggattattggcttgtttcgatgagtggaagcggcatgtttgtagcatacaagttattcaataatcttgtgctgatgacctaaaaatatgtcttaactattcatcaaggaaagcctggtgaagcctttacttgttactacttcaacagttggaattagttgtctttttacttgatgaaacaaaactatacctctgaatatttatggatactttttactaaatcaggcttgtgttcttaatccaaattagtaaagttttatggaagctgaaatgtaatacagtagtctccccttatctgtaagagatacattccaagacccctagtggatgcctgaaacctcagatagtactgaaccctttatcaactatgttttttcagtctgacaaccaaggcggctactaagtgactaaggggcaggtagtatacagtgtggataagcaggacaaaggggtgattcacatcccaggcaggacagagcaggagatcatgagatttcatcactcaggatggcttgtgatttattttattttattcttttttttttttgagatggagtctcactcttgcccaggctggagtgcagtggtgcgatcttggctcactgcaacctctgcctcctgggttcaagcagttctcctgcctcagcctcccaagtagctgggattacaggcgtccgccaccatgcccagccaatttttgtacttttagtagagatggggtttcaccatgttggccaggctggtcttgaactcctgacctcaggtgatccactcgcctcggcctcccaaagtgctgggattataggcatgcgccaccatgcccggccggcttatgatttaaaacatgaattgtttatttctggaattttccacataatatttttggaccaaggttgcctcaggtaacaaactacagaaagtgaaattgcagataaaggggattactgctcctctgctctaaaattggtgtttgggtgatcagaagcaggtagccaatgggaagagcacttctgagtgataactaaagcagtttggtggccttttcacattctccaatgttcaaacatattttccactttccattttctctttcacctcattttgcctctctatcccccatccctgcttatttcttaagcccattgatggcactcattaaattgtatttagggctaatgagtcattgttccttaatatcgttttcaatatgccacaatttaggacacatttaaaattttttaaaacaatatcctaatcaatattgactaatttgagccacattcccaactctaactcagcacacactgccagtcttccccaatatctgtctcctctcaattccccaccacaccttataaaattgtaatcaaagatatctcactctgtcattgttaatctaagaataaaaacactgactttaatacggttttactaagtttcaaccttctaattaggtaggcctctaggtattctgcagatcactgctggtcttgatagccattaatatatgtttgtattatgttatttttcaactaaatcgcagttggaaaaaaaacatatttaatattatgcccttggatctgttactgcatcactagcacttgtgatgcaatagaacacttcgcctgtactgaaagggccaagagtaaatgccttgttttgtttttttgttttgttttgttttgctttttgttaaaacatgtctatagagttggcagttaatgctgaatttgtcaaataccccttccaaaattatacttgtatttaaaaaataaatggatctacctaaaaaaaaaaaaaaaaaa

SEQ ID NO: 2417 - protein, 112 aa, Homo sapien
MSAEVPEAASAEEQKEMEDKVTSPEKAEEAKLKARYPHLGQKPGGSDFLRKRLQKGQKYFDSGDYNMAKAKMKNKQLPTAAPDKTEVTGDHIPTPQDLPQRKPSLVASKLAG

SEQ ID NO: 2418 - DNA, 1093 bp, Homo sapien
gtgacaggagccgaagcagcagcgcaggttgtccccgtttcccctcccccttcccttctccggttgccttcccgggccccttacactccacagtcccggtcccgccatgtcccagaaacaagaagaagagaaccctgcggaggagaccggcgaggagaagcaggacacgcaggagaaagaaggtattctgcctgagagagctgaagaggcaaagctaaaggccaaatacccaagcctaggacaaaagcctggaggctccgacttcctcatgaagagactccagaaagggcaaaagtactttgactcaggagactacaacatggccaaagccaagatgaagaataagcagctgccaagtgcaggaccagacaagaacctggtgactggtgatcacatccccaccccacaggatctgccccagagaaagtcctcgctcgtcaccagcaagcttgcggggtaacctgagcccccctctcctccccttcctcaaccactggacgtttatatattataggcagggatgaaatgggcacctagtcagatcttctcagcttgctagccagaaatgactgtgattctgctgggggctgctgagaaggtaatgtaggttgaaaaggggctctaagtttatttatttcgttagattgacacttccacacactccctgtagtccaggtagggcctagaaataggaaaggctaggattggataatgctgcaaatgctttttttgtgtgagaaactggagagatgtgatttctccttttgggagagaatgtcccaaaattgattaggctgagccttgggaatagtttggcaggtttaacatcccaaggctaacctaacgtagttgggaaaggtagattgaatgagacatgttttctgtgcttctaagtgttctgtcccttaggctgctattgcttcatgtttccattatggcaggtttagagaatccttaaaaagaaaaattgacttgcttgcctaaaactacagtgcccccttagcctccattacttagtatctcttacagtttgctctggctctcaaataatataaagattgatgaacattattcacaaaaaaaaaaaaaaaaa

SEQ ID NO: 2419 - protein, 117 aa, Homo sapien
MSQKQEEENPAEETGEEKQDTQEKEGILPERAEEAKLKAKYPSLGQKPGGSDFLMKRLQKGQKYFDSGDYNMAKAKMKNKQLPSAGPDKNLVTGDHIPTPQDLPQRKSSLVTSKLAG

SEQ ID NO: 2420 - DNA, 2093 bp, Homo sapien
tacctgtgcggccctcaacgtctccttggtgcgggacccgttcactttcggctcccggagtctccctccactgctcagacctctggacctgacaggagacgcctacttggctctgacgcggcgccccagcccggctgtgtccccggcgccccggaccaccctccctgccggctttgggtgcgttgtggggtcccgaggatttgttgaaagacattcaagattacgaagtttagatgaccaaaatggatatccgaggtgctgtggatgctgctgtccccaccaatattattgctgccaaggctgcagaagttcgtgcaaacaaagtcaactggcaatcctatcttcagggacagatgatttctgctgaagattgtgagtttattcagaggtttgaaatgaaacgaagccctgaagagaagcaagagatgcttcaaactgaaggcagccagtgtgctaaaacatttataaatctgatgactcatatctgcaaagaacagaccgttcagtatatactaactatggtggatgatatgctgcaggaaaatcatcagcgtgttagcattttctttgactatgcaagatgtagcaagaacactgcgtggccctactttctgccaatattgaatcgccaggatcccttcactgttcatatggcagcaagaattattgccaagttagcagcttggggaaaagaactgatggaaggcagtgacttaaattactatttcaattggataaaaactcagctgagttcacagaaactgcgtggtagcggtgttgctgttgaaacaggaacagtctcttcaagtgatagttcgcagtatgtgcagtgcgtggccgggtgtttgcagctgatgctccgggtcaatgagtaccgctttgcttgggtggaagcagatggggtaaattgcataatgggagtattgagtaacaagtgtggctttcagctccagtatcaaatgattttttcaatatggctcctggcattcagtcctcaaatgtgtgaacacctgcggcgctataatatcattccagttctgtctgatatccttcaggagtctgtcaaagagaaagtaacaagaatcattcttgcagcatttcgtaactttttagaaaaatcaactgaaagagaaactcgccaagaatatgccctggctatgattcagtgcaaagttctgaaacagttggagaacttggaacagcagaagtacgatgatgaagatatcagcgaagatatcaaatttcttttggaaaaacttggagagagtgtccaggaccttagttcatttgatgaatacagttcagaacttaaatctggaaggttggaatggagtcctgtgcacaaatctgagaaattttggagagagaatgctgtgaggttaaatgagaagaattatgaactcttgaaaatcttgacaaaacttttggaagtgtcagatgatccccaagtcttagctgttgctgctcacgatgttggagaatatgtgcggcattatccacgaggcaaacgggtcatcgagcagctcggtgggaagcagctggtcatgaaccacatgcatcatgaagaccagcaggtccgctataatgctctgctggccgtgcagaagctcatggtgcacaactgggaataccttggcaagcagctccagtccgagcagccccagaccgctgccgcccgaagctaagcctgcctctggccttcccctccgcctcaatgcagaaccagtagtgggagcactgtgtttagagttaagagtgaacactgtttgattttacttggaatttcctctgttatatagcttttcccaatgctaatttccaaacaacaacaacaaaataacatgtttgcctgttaagttgtataaaagtaggtgattctgtatttaaagaaaatattactgttacatatactgcttgcaatttctgtatttattgttctctggaaataaatatagttattaaaggattctcactccaaacatggcctctctctttacttggactttgaacaaaagtcaactgttgtctcttttcaaaccaaattgggagaattgttgcaaagtagtgaatggcaaataaatgttttaaaatct

SEQ ID NO: 2421 - protein, 483 aa, Homo sapien
MTKMDIRGAVDAAVPTNIIAAKAAEVRANKVNWQSYLQGQMISAEDCEFIQRFEMKRSPEEKQEMLQTEGSQCAKTFINLMTHICKEQTVQYILTMVDDMLQENHQRVSIFFDYARCSKNTAWPYFLPILNRQDPFTVHMAARIIAKLAAWGKELMEGSDLNYYFNWIKTQLSSQKLRGSGVAVETGTVSSSDSSQYVQCVAGCLQLMLRVNEYRFAWVEADGVNCIMGVLSNKCGFQLQYQMIFSIWLLAFSPQMCEHLRRYNIIPVLSDILQESVKEKVTRIILAAFRNFLEKSTERETRQEYALAMIQCKVLKQLENLEQQKYDDEDISEDIKFLLEKLGESVQDLSSFDEYSSELKSGRLEWSPVHKSEKFWRENAVRLNEKNYELLKILTKLLEVSDDPQVLAVAAHDVGEYVRHYPRGKRVIEQLGGKQLVMNHMHHEDQQVRYNALLAVQKLMVHNWEYLGKQLQSEQPQTAAARS

SEQ ID NO: 2422 - DNA, 4060 bp, Homo sapien
tgcgggcggccggctaggaggcttggcccccaccccgggacccccgccgtccccgggccggccggccggtgggcacgatgagccaggtgctggggaagccgcagccgcaggacgaggacgacgcggaggaggaggaggaggaggatgagctggtggggctagcggactacggagacgggcccgactcctccgacgccgatccggacagcggcacagaggagggaggatgattacatggaagccctggccaggctccacctcacggtgaccagggcctacaaagtgaatactgacatcaacttcgaggtgtttattcataaagtggatggtctgtcagatgaccacaaaattgaaacccaaagagatattcaccagagggcaaacgatgaccttgcagatgctggattagaaaaaattcacctcagcttttatctgacaagcatatatgatcattcaatatttgaagcttttagcaaagttgttcagaaactgattccacaactcccaactctggagaatttgctgaacatctttatctcaaattctggaattgaaaaggcatttctatttgatgtggtcagtaaaatttatattgcaactgatagtactccggtggatatgcaaacctatgagctctgctgtgatatgatagatgtggttattgacatctcttgtatttatggtctcaaagaagatggagcaggaaccccctatgacaaggaatccacagccatcataaagcttaataatacaaccgtgctttatttaaaagaggtgacaaagttcctggctctcgtttgctttgtcagagaggaaagctttgaaagaaaagggctaattgactataattttcattgcttccggaaggccattcatgaagtttttgaggtgagaatgaaagtagtaaaatctcgaaaggttcagaatcggctgcagaagaaaaagagagccacccctaatgggacccctagagtgctgctgtaggtgaggtttcaggaatgtcttttgaaatcagaccttatccatgaggctgctgcgccatgttgcactaaaggaagaggaagaaggagattgggacacataccattgatttgttgttaaaaaaaaaaaaaattcctgcaaccctcttgatcttctcttttataaataaagtaagcactttgaagcaaaaacttgtatattaacagtgatgtgaaatccattgtcatttcattacacaaatgtaaacttttatggtctgtagtcaaaaaaatcccgtgtgagaactgccaggaattgtacatattttgcactttttcatgtttctcattgaactgaactttgataaaacgacttttctaagctttttttctgtacttggtgtcaaggacatgcatactgtagtccatatctatatggcaatcagaaattaatcaaaaagtgatgcattggtaatgactttttgtaaatttggaaatctttgctaccaattgttgagaaaaatcatttttcagtggagctggaacagattggagctacaagctccaggagcaataagaactgtcccctatttataatgggtgtaaacagttttgtagaataatgctagcaccagacttacctaaaaatttctatagcagtggctgtgcttccctgctcaacggtttttatgaagctgtttacctcaacacacatctctataatcactttatacagagaggttatttctttttgttgcattagtattcttttgaaactttgggaccagatttccaaaatggtgccgaacactggaaaaaagtaagaatgtcactgaattgtagggtttctggaggcttttctgtacctaccacccagggctaaagtaacatcagaggcctaaagttgttccaaaagtatgtgattggcaactgcagactaaaaaacatagatacaattctggacttttggccctgtgcgatggtctggtgtgctgcatttaaaatgcttattcaggaccagttctttattgctccatgaccatagtgaatagaacaaatcgcagaaccccaccatggagctcaatcctgttagtcacttttgtcacctccacatcttcttctcactggtgaaaacatgcctcatgtactccacttgttcccaccttatgattaagccaagctcagcctgccaccagcatgctctgcaaggctgaagagtcatcctgaagacccctaaaggtcagtgggaaaaggatggctggagagacattacaattagctgtgtaattgtttctgtgaaattatttcacttatgtttactttagactaacaggaaattaagagtcctaaatctacccctatgccaaatcattccaagtagataattttacgtgcatctcaagggttagcaccctaaagcatgcttgtggggcattagaaaatgagatttttttttttttaaagcagagcctcctaagaacatcaaagttggtcctagcaaaatatataaagtccctaaagcaacttatacttgaaactttttttttttttttttagaggggggcctcattctgttgcttgtgctggaatacattggtacaatcatagctcactgttacctcttgggctcaagggatccttccacctcagcctccctagtagctagaactacaggtgtgcacaaccacgcccggctaattcttaaattttgtttttgtagagacaggatctcactgtgttgcccaagatggtctcaaactcctggccccaagcaatcctcctgccttggcctcctcaaatgctgagattacaggcctgagctactgtgcccagcctaaactttcccacttctctctgtggcttctttccaacctctctccttcctctccccaagtcctgtttctttgaagctggtaactgaatttaagatgatatctggttggtgtttaaggtttgagcctcccaagggtctgtgcattttgaaaggagatttctaaaaataattaaggtgccctaactcctttcctcatgattcctactccgaaacctggatggttaggagcccagggctccctgatttccagagctatatcctgttggacctttgccaacagacctgacacttaggggttattgttataaatctaattctctaatattttttacatgttgtttcactttgaataagcaaatgaagaatcagttttctaatatgactttatcctcaagctagagacactagcctatttggtaaatcacacattacttaggtatatttattactataaccaggttggagcttccatgtttaagctgggtatatgatgggtttttgttaaaatgtgccttaaaaagcctattacttcaagagcaaatgattctttgggggaaaggcaaaaataattctatgacatagggcccaagttcatggtagtaagtgcactctttgattaatcacacgctaatatagattactgcctctaactttgtaagtgtggcaatgacttcttaattaaagaaagatgcaggagttatgtctaagcgttcagtttttcaaatctgtgttattggaaatgtcttcaagtcattttgcattgtatttttgatatgagaggcagcttattgcgatgtgtatggccatgtttcattctcaaatttaattctataaatacaaatcctaaatacatggctacagcaactgcactggaacatttttgcttggttttagggattgagaacttgccttgcaggtttccttcctcaaaaggagcagggcagtcctttccctgttgagtcaattagaatttttacatagaggtgagactgtgaattattttggttattttcagtgatgtagattagtgtgaatgaccagggtggaatgtttttgaaggaatataaagcaaaaactggttgacattcacaaactgttcttttgtgaacatattttggacccttaaatatgactaaaatcacagcaatattgttacatacgggttatatgccaactctgtttgaaatatactctggaaaaacagctgaattgtcttggttattaaagtatggtatgtattcaacttgtaaaaaaaaaaaaaaaaaaa

SEQ ID NO: 2423 - protein, 249 aa, Homo sapien
MEALARLHLTVTRAYKVNTDINFEVFIHKVDGLSDDHKIETQRDIHQRANDDLADAGLEKIHLSFYLTSIYDHSIFEAFSKVVQKLIPQLPTLENLLNIFISNSGIEKAFLFDVVSKIYIATDSTPVDMQTYELCCDMIDVVIDISCIYGLKEDGAGTPYDKESTAIIKLNNTTVLYLKEVTKFLALVCFVREESFERKGLIDYNFHCFRKAIHEVFEVRMKVVKSRKVQNRLQKKKRATPNGTPRVLL

SEQ ID NO: 2424 - DNA, 1453 bp, Homo sapien
ggccacgaaggccggcccccaccccgggacccccgccgtccccgggccggccggccggtgggcacgatgagccaggtgctggggaagccgcagccgcaggacgaggacgacgcggaggaggaggaggaggaggatgagctggtggggctagcggactacggagacgggcccgactcctccgacgccgatccggacagcggcacagaggagggagttctggacttcagtgaccccttcagcactgaagtgaagccgagaatcctgctcatgggcctgaggagaagcggcaagtcgtctattcagaaagttgtctttcacaaaatgtctcccaacgaaactctgttcttggagagcactaataagatatgccgggaagatgtttccaacagctcctttgtcaattttcagatttgggacttcccaggacagattgacttttttgaccctacatttgactatgagatgatcttccggggaacaggagcactgatatttgtcattgactcacaggatgattacatggaagccctggccaggctccacctcacggtgaccagggcctacaaagtgaatactgacatcaacttcgaggtgtttattcataaagtggatggtctgtcagatgaccacaaaattgaaacccaaagagatattcaccagagggcaaacgatgaccttgcagatgctggattagaaaaaattcacctcagcttttatctgacaagcatatatgatcattcaatatttgaagcttttagcaaagttgttcagaaactgattccacaactcccaactctggagaatttgctgaacatctttatctcaaattctggaattgaaaaggcatttctatttgatgtggtcagtaaaatttatattgcaactgatagtactccggtggatatgcaaacctatgagctctgctgtgatatgatagatgtggttattgacatctcttgtatttatggtctcaaagaagatggagcaggaaccccctatgacaaggaatccacagccatcataaagcttaataatacaaccgtgctttatttaaaagaggtgacaaagttcctggctctcgtttgctttgtcagagaggaaagctttgaaagaaaagggctaattgactataattttcattgcttccggaaggccattcatgaagtttttgaggtgagaatgaaagtagtaaaatctcgaaaggttcagaatcggctgcagaagaaaaagagagccacccctaatgggacccctagagtgctgctgtaggtgaggtttcaggaatgtcttttgaaatcagaccttatccatgaggctgctgcgccatgttgcactaaaggaagaggaagaaggagattgggacacataccattgatttgttgttaaaaaaaaaaaaattcctgcaaccctcttgatcttctcttttataattaaagtcagcacttgaagcggg

SEQ ID NO: 2425 - protein, 400 aa, Homo sapien
MSQVLGKPQPQDEDDAEEEEEEDELVGLADYGDGPDSSDADPDSGTEEGVLDFSDPFSTEVKPRILLMGLRRSGKSSIQKVVFHKMSPNETLFLESTNKICREDVSNSSFVNFQIWDFPGQIDFFDPTFDYEMIFRGTGALIFVIDSQDDYMEALARLHLTVTRAYKVNTDINFEVFIHKVDGLSDDHKIETQRDIHQRANDDLADAGLEKIHLSFYLTSIYDHSIFEAFSKVVQKLIPQLPTLENLLNIFISNSGIEKAFLFDVVSKIYIATDSTPVDMQTYELCCDMIDVVIDISCIYGLKEDGAGTPYDKESTAIIKLNNTTVLYLKEVTKFLALVCFVREESFERKGLIDYNFHCFRKAIHEVFEVRMKVVKSRKVQNRLQKKKRATPNGTPRVLL

SEQ ID NO: 2426 - DNA, 3641 bp, Homo sapien
ctgcactgaagagggagagcgagagagagactggagacgcacagatccccccaaggtctcccaagcctaccgtcccacagattattgtacagagccccaaaaatcgaaacagaggaaacgaacagcagttgaacatggacgaaggaattcctcatttgcaagagagacagttactggaacatagagattttataggactggactattcctctttgtatatgtgtaaacccaaaaggagcatgaaacgagacgacaccaaggatacctacaaattaccgcacagattaatagaaaagaaaagaagagaccgaattaatgaatgcattgctcagctgaaagatttactgcctgaacatctgaaattgacaactctgggacatctggagaaagctgtagtcttggaattaactttgaaacacttaaaagctttaaccgccttaaccgagcaacagcatcagaagataattgctttacagaatggggagcgatctctgaaatcgcccattcagtccgacttggatgcgttccactcgggatttcaaacatgcgccaaagaagtcttgcaatacctctcccggtttgagagctggacacccagggagccgcggtgtgtccagctgatcaaccacttgcacgccgtggccacccagttcttgcccaccccgcagctgttgactcaacaggtccctctgagcaaaggcaccggcgctccctcggccgccgggtccgcggccgccccctgcctggagcgcgcggggcagaagctggagcccctcgcctactgcgtgcccgtcatccagcggactcagcccagcgccgagctcgccgccgagaacgacacggacaccgacagcggctacggcggcgaagccgaggcccggccggaccgcgagaaaggcaaaggcgcgggggcgagccgcgtcaccatcaagcaggagcctcccggggaggactcgccggcgcccaagaggatgaagctggattcccgcggcggcggcagcggcggcggcccggggggcggcgcggcggcggcggcagccgcgcttctggggcccgaccctgccgccgcggccgcgctgctgagacccgacgccgccctgctcagctcgctggtggcgttcggcggaggcggaggcgcgcccttcccgcagcccgcggccgccgcggcccccttctgcctgcccttctgcttcctctcgccttctgcagctgccgcctacgtgcagcccttcctggacaagagcggcctggagaagtatctgtacccggcggcggctgccgccccgttcccgctgctataccccggcatccccgccccggcggcagccgcggcagccgccgccgccgctgccgccgccgccgccgcgttcccctgcctgtcctcggtgttgtcgccccctcccgagaaggcgggcgccgccgccgcgaccctcctgccgcacgaggtggcgccccttggggcgccgcacccccagcacccgcacggccgcacccacctgcccttcgccgggccccgcgagccggggaacccggagagctctgctcaggaagatccctcgcagccaggaaaggaagctccctgaatccttgcgtcccgaaggacggaggttcaagcagagtgagaagttaaaatacccttaaggaggttcaagcagagtgagaagttaaaatacccttaaggtctttaagggaggaagtgtaatagatgcacgacaggcataaacaagaacaacaaaacaggtgttatgtgtacattcggagttcctgttttgctcatcccgcaccaccccaccctccacacactaacatccctttcttccccccaccagctgtaaaagatcctatgcgaaagacactggctcttttttttaatcccccaaataaattttgcccccttttaggccatgttccattatctcttaaaattggaacctaattcgagaggaagtaagaagggtctgttctgtggctgagctaggtgaaccccggggtaggggaaagatgttaacacctttgacgtctttggagttgacatggaacagcaggtagttgttatgtagagctagttctcaaagctgccctgcctgttttaggaggcgttccacaaacagattgaggctctttttagaattgaatttactcttcagtattttctaatgttcagctttctaaaaggcatatatttttcaaagaagtgaggatgcagtttctcacgttgcaacctattctgaagtggtttaaatggtatctcttagtaacttgcactcgttaaagaaacacggagctgggccatcgtcagaactaagtcagggaaggagatggatgagaaggccagaatcattcctagtacatttgctaacactttattgagaaattgaccatgaattaatggactcatcttaatttcttctaagtccatatatagatagatatctatctgtacagatttctatttatccatagataggtatctatacatacacatctcaagtgcatctattcccactctcattaatccatcatgttcctaaatttttgtaatcttactgtaaaaaaaagtgcactgaacttcaaaacaaaacaaaaaacaacaacaacaaaaaacaagtccaaactgatatatcctatattctgttaaaattcaaaagtgaacgaaagcatttaactggccagttttgattgcaaatgctgtaaagatatagaatgaagtcctgtgaggccttcctatctccaagtctatgtattttctggagaccaaaccagataccagataatcacaaagaaagcttttttaataaggcttaaaccaagaccttgtctagatatttttagtttgttgccaaggtagcactgtgagaaatctcacttggatgttatgtaaggggtgagacacaacagtctgactatgagtgaggaaaatatctgggtcttttcgtcagtttggtgcatttgctgctgctgttgctactgtttgcctcaaacgctgtgtttaaacaacgttaaactcttagcctacaaggtggctcttatgtacatagttgttaatacatccaattaatgatgtctgacatgctatttttgtagggagaaaatatgtgctaatgatattttgagttaaaatatcttttggggaggatttgctgaaaagttgcacttttgttacaatgcttatgcttggtacaagcttatgctgtcttaaattattttaaaaaaattaaatactgtctgtgagaaaccagctggtttagaaaagtttagtatgtgacgataaactagaaattacctttatattctagtattttcagcactccataaattctattacctaaatattgccacactattttgtgatttaaaaattcttactaaggaataaaaactttaatatacgatatgatattgtctaataattaaaaaagacataatggatgctcaattagttttaagatatctataactatagggatacaaatcactacagttctcagatttacaccttttttttgtcattggcttgatgtcacacatttccaatctcttgcaagcctccaggctctggctttgtctacctgctcgttcccaatgtatcttaatgaaaagtgcaaaagaaaaacctaccaattaaaaaaaaaaaaaaaaaa

SEQ ID NO: 2427 - protein, 482 aa, Homo sapien
MDEGIPHLQERQLLEHRDFIGLDYSSLYMCKPKRSMKRDDTKDTYKLPHRLIEKKRRDRINECIAQLKDLLPEHLKLTTLGHLEKAVVLELTLKHLKALTALTEQQHQKIIALQNGERSLKSPIQSDLDAFHSGFQTCAKEVLQYLSRFESWTPREPRCVQLINHLHAVATQFLPTPQLLTQQVPLSKGTGAPSAAGSAAAPCLERAGQKLEPLAYCVPVIQRTQPSAELAAENDTDTDSGYGGEAEARPDREKGKGAGASRVTIKQEPPGEDSPAPKRMKLDSRGGGSGGGPGGGAAAAAAALLGPDPAAAAALLRPDAALLSSLVAFGGGGGAPFPQPAAAAAPFCLPFCFLSPSAAAAYVQPFLDKSGLEKYLYPAAAAAPFPLLYPGIPAPAAAAAAAAAAAAAAAAFPCLSSVLSPPPEKAGAAAATLLPHEVAPLGAPHPQHPHGRTHLPFAGPREPGNPESSAQEDPSQPGKEAP

SEQ ID NO: 2428 - DNA, 1424 bp, Homo sapien
gggactgagggggtgggcttactccctgggcagtcttgggggccagagctgaggccagtccatattacagtggctgggctgtttttttcagtagcccctagcattggctgggattcctgttcctgggtgcgcctccacctcccttctgatgcttcctggctatggtggggtgggaacctcagtttcccccaaagtcttccctggatgctggcttcaggttgaagaccctggttcttccagttcctcacgggttaggtaggggctcctgcatcaccttcagaatcagttccaacccccactctccttaggctttgtgctctgctctgccctgccaggctgcccttgtccatgtgagtagcatgggcgggtggtggggacggcagtggtgatgaagggggtgcaccacaggcctcatgaagcagttcccacatgggcgtgtggctggggcgtggccaccacagagcacatggctgtgtctaggcgcaagcactttagcagtatctgtttacatgcgcaaggatcaagccgactacctgtgctgtctactgggacagcagtctccgagctactccgtacctccctctgccaggtcgtggagttaggccccagtccctacttgtcactggttcccactgtgctcctaactgtgcagcacctgggagctctggcctggggctggaggccctggtaggagctgcagttggaggccgttctgtgcccagcagcggtgagcggctcccatgggccctgtgtctgcagggagccagggctgcggcacatgtgctgtgaaactggcacccacctggcgtgctgctgccgccacttgcttcctgcagcacctcctaccctgctccgtgtcctccctctccccgcgcctggctcaggagtgctggaaaagctcacgcctcggcctgggagcctggcctcttgatatacctcgagcttcccctgtgctccccagccccaggaccactggccccttggcctgaggggctgggggccccacgacctgcagcgtcgagtccgggagagagcccggagcggcgtgccatctcggctcggccttgctgagagcctccgccctggctttctccctgtctggtttcagtggctcacgttggtgctacacagctagaatagatatatttagagagagagatatttttaagacaaagcccacaattagctgtcctttaacaccgcagaaccccctcccagaagaagagcgatccctcggacggtccgggcgggcaccctcagccgggctctttgcagaagcagcaccgctgactgtgggcccggccctcagatgtgtacatatacggctatttcctattttactgttcttcagatttagtacttgtaaataaacacacacattaaggagagattaaacatttttgccaaaaaaaaaaaaaaaaaaa

SEQ ID NO: 2429 - DNA, 895 bp, Homo sapien
gcggagcgaggctggaggcgcgggagggcagcgagaggttcgcgggtgcagcgcacaggagaccatgtccgggggcagcagctgcagccagaccccaagccgggccatccccgccactcgccgggtggtgctcggcgacggcgtgcagctcccgcccggggactacagcacgacccccggcggcacgctcttcagcaccaccccgggaggtaccaggatcatctatgaccggaaattcctgatggagtgtcggaactcacctgtgaccaaaacacccccaagggatctgcccaccattccgggggtcaccagcccttccagtgatgagccccccatggaagccagccagagccacctgcgcaatagcccagaagataagcgggcgggcggtgaagagtcacagtttgagatggacatttaaagcaccagccatcgtgtggagcactaccaaggggcccctcagggccttcctgggaggagtcccaccagccaggccttatgaaagtgatcatactgggcaggcgttggcgtggggtcggacaccccagccctttctccctcactcagggcacctgccccctcctcttcgtgaacaccagcagatacctccttgtgcctccactgatgcaggagctgccaccccaaggggagtgacccctgccagcacaccctgcagccaagggccaggaagtggacaagaacgaacccttccttccgaatgatcagcagttccagcccctcgctgctgggggcgcaaccaccccttccttaggttgatgtgcttgggaaagctccctccccctccttccccaagagaggaaataaaagccaccttcgccctaggaaaaaaaaaaaaaaaaaaaaaaaaaaaaaaaaaaaaaaaaaaaaaaaaaaa

SEQ ID NO: 2430 - protein, 118 aa, Homo sapien
MSGGSSCSQTPSRAIPATRRVVLGDGVQLPPGDYSTTPGGTLFSTTPGGTRIIYDRKFLMECRNSPVTKTPPRDLPTIPGVTSPSSDEPPMEASQSHLRNSPEDKRAGGEESQFEMDI

SEQ ID NO: 2431 - DNA, 4574 bp, Homo sapien
ggcggctgctcccattgagctgtctgctcgctgtgcccgctgtgcctgctgtgcccgcgctgtcgccgctgctaccgcgtctgctggacgcgggagacgccagcgagctggtgattggagccctgcggagagctcaagcgcccagctctgcccgaggagcccaggctgccccgtgagtcccatagttgctgcaggagtggagccatgagctgcgtcctgggtggtgtcatccccttggggctgctgttcctggtctgcggatcccaaggctacctcctgcccaacgtcactctcttagaggagctgctcagcaaataccagcacaacgagtctcactcccgggtccgcagagccatccccagggaggacaaggaggagatcctcatgctgcacaacaagcttcggggccaggtgcagcctcaggcctccaacatggagtacatgacctgggatgacgaactggagaagtctgctgcagcgtgggccagtcagtgcatctgggagcacgggcccaccagtctgctggtgtccatcgggcagaacctgggcgctcactggggcaggtatcgctctccggggttccatgtgcagtcctggtatgacgaggtgaaggactacacctacccctacccgagcgagtgcaacccctggtgtccagagaggtgctcggggcctatgtgcacgcactacacacagatagtttgggccaccaccaacaagatcggttgtgctgtgaacacctgccggaagatgactgtctggggagaagtttgggagaacgcggtctactttgtctgcaattattctccaaaggggaactggattggagaagccccctacaagaatggccggccctgctctgagtgcccacccagctatggaggcagctgcaggaacaacttgtgttaccgagaagaaacctacactccaaaacctgaaacggacgagatgaatgaggtggaaacggctcccattcctgaagaaaaccatgtttggctccaaccgagggtgatgagacccaccaagcccaagaaaacctctgcggtcaactacatgacccaagtcgtcagatgtgacaccaagatgaaggacaggtgcaaagggtccacgtgtaacaggtaccagtgcccagcaggctgcctgaaccacaaggcgaagatctttggaactctgttctatgaaagctcgtctagcatatgccgcgccgccatccactacgggatcctggatgacaagggaggcctggtggatatcaccaggaacgggaaggtccccttcttcgtgaagtctgagagacacggcgtgcagtccctcagcaaatacaaaccttccagctcattcatggtgtcaaaagtgaaagtgcaggatttggactgctacacgaccgttgctcagctgtgcccgtttgaaaagccagcaactcactgcccaagaatccattgtccggcacactgcaaagacgaaccttcctactgggctccggtgtttggaaccaacatctatgcagatacctcaagcatctgcaagacagccgtgcacgcgggagtcatcagcaacgagagtgggggtgacgtggacgtgatgcccgtggataaaaagaagacctacgtgggctcgctcaggaatggagttcagtctgaaagcctggggactcctcgggatggaaaggccttccggatctttgctgtcaggcagtgaatttccagcaccaggggagaaggggcgtcttcaggagggcttcggggttttgcttttatttttattttgtcattgcggggtatatggagagtcaggaaacttcctttgactgatgttcagtgtccatcactttgtggcctgtgggtgaggtgacatctcatcccctcactgaagcaacagcatcccaaggtgctcagccggactccctggtgcctgatcctgctggggcccgggggtctccatctggacgtcctctctcctttagagatctgagctgtctcttaaaggggacagttgcccaaaatgttccttgctatgtgttcttctgttggtggaggaagttgatttcaacctccctgccaaaagaacaaaccatttgaagctcacaattgtgaagcattcacggcgtcggaagaggccttttgagcaagcgccaatgagtttcaggaatgaagtagaaggtagttatttaaaaataaaaaacacagtccgtccctaccaatagaggaaaatggttttaatgtttgctggtcagacagacaaatgggctagagtaagagggctgcgggtatgagagaccccggctccgccctggcacgtgtccttgctggcggcccgccacaggcccccttcaatggccgcattcaggatggctctatacacagcagtgctggtttatgtagagttcagcagtcacttcagagatgtatcttgtctttgtcaggcccttcatcttcatggcccacctgttttctgccgtgacctttggtcccattgaggactaaggatcgggaccctttctttaccccctacccattgtggctcccaccctgcctcggactggtttacgtgtcctggttcacacccaggacttttctttgcaagcgaacctgtttgaagcccaagtcttaactcctggtctcgtaaggttccactgagacgagatgtctgagaacaaccaaagaaggcctgctctttgctgcttttaaaaaatgacaattaaatgtgcagattccccacgcacccgatgacctattttttcagccgtgggaggaatggagtctttggtacattcctcaccgaggttagcagctcagtttgtggttatgaaaccgtctgtggcctcatgacagcgagagatgggaatacactagaaggatctcttttcctgttttcgtgaaacgactcttgccaaacgttcccgaggcgccaaggagtgtagtacaccctggctgccatcactctataaaagtgcttcatgagcccagaccaaaagcccacagtgaaatgaagtacccttttgtaaatagcatttttttgcagaaggtgaaaattccactctctaccaccgggccagccaatagatcactttggtgaatgctagtttcaaatttgattcaaaatatttcttaggtgaaagaactagcagaaagtcaaaaactaagatactgtagactggacaagaaattctacctgggcacctaggtgatgccttctttctttgattgcctttctaataaatgcagaatctgaaggtaaataggtttaaaacaaaacaaaaacccacccctttaaggagttggtaaaaagcagttcaactcttagcttgactgagctaaaattcacaggactacgtgctttgtgcattgtagtctagtcgtaattcataggtactgactcctcagccccaaatgtcggagaggaagaattcggtcagcctgtcaggtcgtgagtccagttaccaccaaacatctgggaaacttctgggtgctgggtgctctgctgctggacttttgtggctgtgtctgtgtctgcaagataaattagatcgccctgtggggtttgcagaattagtgaagggtccaggacgatcccagtgggctcgcttccaaagcatcccactcaagggagacttgaaacttccagtgtgagttgaccccatcatttaaaaataaagtccccgggttccttaatgcctccttcactgggccttcctagcaggatagaaagtccttgcccagagcaggacctggctgtctttttttttttttttttcccgagaccaagtttcactctgttgcccaaggtagagtgcagtggcgtgatctctgctcattgcaactgccgcctcccgggttcaagcaattctcatgcatcagcctcccaagtacctgggactacaggcgtgagctaccatgcccggctaatttttgtatttttagtagagatggggtttcattatgttggccaggctggtctcgaactccttacctcaggtgatccacccaccttggcctcccgaagtgctgggattacaggcatgagccactgcgcccggccatggacctggctgtctttatcatccccacaaacattttgaaactggaatatttgtcttcagaaaatggaaacaagactataaatgataagccctgtccctagcaccacctctcctgtgtgtggaatagaggcccctcgtgctaccaacacttaccctgtgtttaaaaagatcttgtaccaagccaacggcgttcctggctctcctgcccacaggatgaacattttcggcttccttaggagttttgccctaccgtattccaaagcgtgtgctggtttctcatattgtctgtaggctcactcagcccgcagtttatgtgtgtgcttttttctatgaaaaatgatgtattttgctacttcctgtgtacaaagttttattgtaaatgttttttgtgctttgcatgaacaggggccacgttgttgcaattgtttcagtagaactggtttgatttctaaaatgttcctgtaacatatcttttatgaacaaatctgaacaatttgtgaaataaaacattgaaaaccaaaaaaaaaaaaaaaaa

SEQ ID NO: 2432 - protein, 497 aa, Homo sapien
MSCVLGGVIPLGLLFLVCGSQGYLLPNVTLLEELLSKYQHNESHSRVRRAIPREDKEEILMLHNKLRGQVQPQASNMEYMTWDDELEKSAAAWASQCIWEHGPTSLLVSIGQNLGAHWGRYRSPGFHVQSWYDEVKDYTYPYPSECNPWCPERCSGPMCTHYTQIVWATTNKIGCAVNTCRKMTVWGEVWENAVYFVCNYSPKGNWIGEAPYKNGRPCSECPPSYGGSCRNNLCYREETYTPKPETDEMNEVETAPIPEENHVWLQPRVMRPTKPKKTSAVNYMTQVVRCDTKMKDRCKGSTCNRYQCPAGCLNHKAKIFGTLFYESSSSICRAAIHYGILDDKGGLVDITRNGKVPFFVKSERHGVQSLSKYKPSSSFMVSKVKVQDLDCYTTVAQLCPFEKPATHCPRIHCPAHCKDEPSYWAPVFGTNIYADTSSICKTAVHAGVISNESGGDVDVMPVDKKKTYVGSLRNGVQSESLGTPRDGKAFRIFAVRQ

SEQ ID NO: 2433 - DNA, 4011 bp, Homo sapien
gggtagagacggggtttcaccgtgttagccaggatggtctggatctcctgacctcgtgatccacccacctcggcctcctaaagtgctgggattacagacatgagccaccgcgcccagccctattcatcccttttcaaaagtcagaccctaggaagctggagggaggtggggcatggttttacagtgaatttctgatttcactcagggtgataaatcagactcttggggaagcgggtggtggctctggacagcagcaggaatggggatccagttagcaacaaatccatggacctatgacaggctgaaagccaccccttctccatctttgggaggttgccaatgtctgatttaacactatccaatgaatgatcattgaaagtaaaaaataactatcaactagcagaaaatataaatggtaagcattagcacatatttcacatgtttatatttggctctcagattgacctataaaacaaagtctgggaaattctatatgatcctgaaaaaatgatacgctggtctggatggtagaataagttggagaaatgtttaagccaaaatgcagtcttaccaatgactttttattttattttattaattttcaggatttttggtatacaggtggtttttggttacatggaaaagttctttactggtgatttctgagattttagttcaccccttatcctgagcagtgtacactgttcccaatatgtagccttttatccctcaccccctctaagttcaagaagactatggtcctgcagaaagctttatatgtaattaacatatctttatctttatctttataggcagtagactcatcttttgaaacagattccattaagagtgaatgtgtaccctccctctagcctttattattactgtttttgctattacatgtgttagtgtatgtgaatttaatgcttaaaaatgtatcccattggctactatggcaaaaggttgactcataagagtttagcacgggttaagatctgaaagttttctcccagcctcttatcactggcgcagacttcacaattcatggaagccaccagtgagatgacattgcctcaggcagttactatttttatattctataactcgaggagctcagggtttcggaaatcattaaactttttttgtccttttaaagttggagacagcaattgtagacagccttccagtgggttatctttttgtgtctccttacctgtggagaagcctattagctgggatatgtagttaaatagctatatttatatatatccagggcaccccgaattcgggagagcttcccggagtcgaccttcctgctggctgctctgtgaccgcttcccggctctgccctcttggccgaagtgcccgctgccgggcgcgggcctcagacaatacaatggtgggtgaagagaagatgtctctaagaaaccggctgtcaaagtccagggaaaatcctgaggaagatgaagaccagagaaaccctgcaaaggagtccctagagacacctagtaatggtcgaattgacataaaacagttgatagcaaagaagataaagttgacagcagaggcagaggaattgaagccattttttatgaaggaagttggcagtcactttgatgattttgtgaccaatctcattgaaaagtcagcatcattagataatggtgggtgcgctctcacaaccttttctgttcttgaaggagagaaaaacaaccatagagcgaaggatttgagagcacctccagaacaaggaaagatttttattgcaaggcgctctctcttagatgaactgcttgaagtggaccacatcagaacaatatatcacatgtttattgccctcctcattctctttatcctcagcacacttgtagtagattacattgatgaaggaaggctggtgcttgagttcagcctcctgtcttatgcttttggcaaatttcctaccgttgtttggacctggtggatcatgttcctgtctacattttcagttccctattttctgtttcaacattgggccactggctatagcaagagttctcatccgctgatccgttctctcttccatggctttcttttcatgatcttccagattggagttctaggttttggaccaacatatgttgtgttagcatatacactgccaccagcttcccggttcatcattatattcgagcagattcgttttgtaatgaaggcccactcatttgtcagagagaacgtgcctcgggtactaaattcagctaaggagaaatcaagcactgttccaatacctacagtcaaccagtatttgtacttcttatttgctcctacccttatctaccgtgacagctatcccaggaatcccactgtaagatggggttatgtcgctatgaagtttgcacaggtctttggttgctttttctatgtgtactacatctttgaaaggctttgtgcccccttgtttcggaatatcaaacaggagcccttcagcgctcgtgttctggtcctatgtgtatttaactccatcttgccaggtgtgctgattctcttccttactttttttgcctttttgcactgctggctcaatgcctttgctgagatgttacgctttggtgacaggatgttctataaggattggtggaactccacgtcatactccaactattatagaacctggaatgtggtggtccatgactggctatattactatgcttacaaggactttctctggtttttctccaagagattcaaatctgctgccatgttagctgtctttgctgtatctgctgtagtacacgaatatgccttggctgtttgcttgagctttttctatcccgtgctcttcgtgctcttcatgttctttggaatggctttcaacttcattgtcaatgatagtcggaaaaagccgatttggaatgttctgatgtggacttctcttttcttgggcaatggagtcttactctgcttttattctcaagaatggtatgcacgtcggcactgtcctctgaaaaatcccacatttttggattatgtccggccacgttcctggacttgtcgttacgtgttttagaagcttggactttgtttcctccttgtcactgaagattgggtagctccctgatttggagccagctgtttccagttgttactgaagttatctgtgttatttggaccactccaggctttacagatgactcactccattcctaggtcacttgaagccaaactgttggaagttcactggagtcttgtacacttaagcagagcagaactttttttgtggggctgggtggggggagaagaccgactaacagctgaagtaatgacagattgttgctgggtcatatcagctttatcccttggtaattatatctgttttgtttcttgactctgtccaatcagagaataaacatcatagtttcttggccactgaattagccaaaacacttaggaagaaatcacttaaatacctctggcttagaaattttttcatgcacactgttggaatgtatgctaattgaacatgcaattggggaagaaaaaatgtagaatgatttttgctatttctagtagaaagaaaatgtctgttttccaaagataatgttatacatcctattttgtaatttttttgaaaaaagttcaatgttcagttttccttagtttttaccttgttttctctataggtcatgatttctgtgaagcaaaaagatgccttttaccatgaattcttgagtttacatcaataatattgtatattaaggggatcagaagtaggaaggaaaaaataagagatagcagaggaaaaagaaaaacatttcctcttataacttctgaagtaatttgtaaaaaagatttgtagagtcaatcatgtgtttaaattattttatcacaaacttaacatggaagatattcctttttaactttgtggtaacttctttgaagttatttagaaatatcctttggaacaattattttattgtctaataaatattgacttctcttgaattattttgcagactagtgagtctgtac

SEQ ID NO: 2434 - protein, 550 aa, Homo sapien
MVGEEKMSLRNRLSKSRENPEEDEDQRNPAKESLETPSNGRIDIKQLIAKKIKLTAEAEELKPFFMKEVGSHFDDFVTNLIEKSASLDNGGCALTTFSVLEGEKNNHRAKDLRAPPEQGKIFIARRSLLDELLEVDHIRTIYHMFIALLILFILSTLVVDYIDEGRLVLEFSLLSYAFGKFPTVVWTWWIMFLSTFSVPYFLFQHWATGYSKSSHPLIRSLFHGFLFMIFQIGVLGFGPTYVVLAYTLPPASRFIIIFEQIRFVMKAHSFVRENVPRVLNSAKEKSSTVPIPTVNQYLYFLFAPTLIYRDSYPRNPTVRWGYVAMKFAQVFGCFFYVYYIFERLCAPLFRNIKQEPFSARVLVLCVFNSILPGVLILFLTFFAFLHCWLNAFAEMLRFGDRMFYKDWWNSTSYSNYYRTWNVVVHDWLYYYAYKDFLWFFSKRFKSAAMLAVFAVSAVVHEYALAVCLSFFYPVLFVLFMFFGMAFNFIVNDSRKKPIWNVLMWTSLFLGNGVLLCFYSQEWYARRHCPLKNPTFLDYVRPRSWTCRYVF

SEQ ID NO: 2435 - DNA, 963 bp, Homo sapien
ggcttccggcaccggccgaggtgcgggtcgcctccagagatcctgtgccttcaaaccctacgagtccatactttaaaacaaaatgaagaaagtaaggcttaaggaactagagagtcgcctgcaacaagtggatggatttgaaaagcccaagctacttctggaacagtatcctaccaggccgcacattgcagcatgtatgctctatacaatccataacacttatgatgacattgaaaataaagtcgttgcagatctaggatgtggttgtggagtacttagcatcggaactgcaatgttaggagcagagttgtgtgttggatttgacatagatgaagacgcattggaaatatttaataggaatgcagaagagtttgagttacaaatattgacatggttcaatgtgctgtgtgcttattatctaacagaatgtccaagtcattcgatacagtattatgaatcctccctttgggaccaaaaataataaagggacagatatggctttctaaagactgctttggaaatggcaagaacagcagtatattccttacacaaatcctcaactagagaacatgttcaaagaaagctgcagaatggaaaatcaagatagatattatagcagaacttcgatatgacctgccagcatcatacaagtttcacaaaaagaaatcagtctgatcatctaaatcacccgaaaatttcagcaagcatccaatcttttcttctagagatttctataaaaatatacaaagtgatcaaaaagtttcttaaaagcaacaacagaccagaaatgactcacaccaccttatagctatacaagaaaaagactagaaaccaaaatgctattttaaagtagtttcttccgccggggcagcaagagcgaaactccatctcaaaaaataataataataataaataaataaagtagtttcatagaaaaaaaaaaaaaaaaaaaaaaaaaaaaaa

SEQ ID NO: 2436 - protein, 132 aa, Homo sapien
MKKVRLKELESRLQQVDGFEKPKLLLEQYPTRPHIAACMLYTIHNTYDDIENKVVADLGCGCGVLSIGTAMLGAELCVGFDIDEDALEIFNRNAEEFELQILTWFNVLCAYYLTECPSHSIQYYESSLWDQK

SEQ ID NO: 2437 - DNA, 5844 bp, Homo sapien
gtctttgtggcccaaactgttctagaaaatgggacatatattaaagatgatacaatttttattaaagtcatagtggatacttcggatctgcccgatccctgataagtagctggggaggtggatttagcagaaggcaactcctctgggggatttgaaccggtctgtcttcactgaggtcctcgcgctcagaaaaggaccttgtgagacggaggaagcggcagaaggcggacgcgtgccggcgggaggagccacgcgtgagcacacctgacacgttttataatagactagccacacttcactctgaagaattatttatccttcaacaagataaatattgctgtcagagaaggttttcattttcatttttaaagatctagttaattaaggtggaaaacatatatgctaaacaaaagaaacatgatttttcttccttaaacttgaacaccaaaaaaacacacacacacacacacgtggggatagctggacatgtcagcatgttaagtaaaaggagaatttatgaaatagtaatgcaattctgatatcttctttctaaaattcaagagtgcaattttgtttcaaatacagtatattgtctatttttaaggcctcatctggtctctgttttaataatttgtttgtcagaagaccctgaagtatatacctaggtcttttttttgaaagtctctaaattcagaatcattttttaatttaaagttctacaaataattgttactgcaaacattttattttaaaacgttgatagactgatatttcttggaagaaaatataaaatatcaaacactggttatcacttgtgataggaaagagaatattcaacctgttgttatttctcgttagaaatgtaaaccttcaaatatctgtcgtagttaatgacacgacttcacaattctgaacggagcctcgctcatggatgctgtgcatcattttcagatttataattgttttcaccctaaaatagggcatccgttgaactttggagttctaaacaaaatcctgtaggtgtttggattctgccccatgtgttcggacgagctctctgttgctgacagcaccggccttcggtctccatgtcaggggtgggcgggtgactgctgagggaggcccgcaggtgtgtttctccatcccgtcatcttgctgcatgccgtcaacggtctccgaaagcaacgttgtgcgtagagctggtggcatacggcccacgtgccttagatgggacatgctgcttctccaccctgggtttgcattgagcatcattctagaaagtgctagtttaaccagacttttctctccaccactagatctttgtctctacaagggccctcagacacctctgcacctgctgaggggaagccaggctccaccgtcggcttctggagcctccgctgcttaattaccacagattccaaatctctaggccccacgagtgagccgcctggtccaagtacggcctggtcccaccctgagggaggcaggtgtggaacagaagccgagcctctccgtgtccccaccggggccgtgggcacccccacagcccgaagcagaaccctctgagcattccagagaccgctgctcgggggcctgcccaggctgaccaacgggcgctcctgaccaccaccctggcgggaagggtggccacggggcccgtcgtcccagcctgtgcctgcccagatggcattttctcaactcactgtttactgtctctcagtgtccaactgtgattagaagcctggagcctgccccctgcaccccttttgctatgcaccacgcttcatggtgctcttaccactgatgggtgctacacgcgacgggtgcttcttaggcaaaaccaatgtatgcgaactgtcacacctgtgccactcgcccacaagccgcgcccacaattggccagctgggccgtgcacgtcagactgcctgcctcggctctccccgtggccgcgcggggacagcttggtgggtgcccggtggcccacctgtctctggtgctgccatctgtcctgggtgtgccttcgccccagtgcctgctggaagtgccctccgtcgcacccctgtgccctgagctcccgtgaggggcccgccgcgccctttcgcggtcgaagcgttccgttgttcttatctgcctttcctttccccgctctcctgggattactttgggggaatgagtatccttggttctgccctgtgagggagtcgtgtgtccctgctcataaaggaaggacttcctgcagaagctgcggaaaactactgttccctcgaaggtgtcccccacctgaggcctgtcccctacctgccctcaggtagttttcctgaggccaggggttaacaacagggacatccctgcaacttccccttcacaaaatgtataatattagatgaaggatatgcaacatcttggtctagtaagaaccgtttcctcccctctgggttgaagtcctggtgtggcccccagaagcagcagtgcgtgtcactgggacgtctccagtagcccttcccaggcagacgctcctggcgggacgccatggggcccacctgagggtcccacagacgtaacctgagtgacaggagtccttgaggatgggatggcctatgtcacacactttgtccttgaacctgagtgatgggggtcattgaggatgggatggcctgtgtcacgcgctttgtctttgtgtttggttgtatcggggtctctgttctgagtgtgtcttcctctcatgtactcaacacagtgggcagcagcctgggacggcgtcccctctcccggcggcgggcaagccttgcgctgctccaccctcggcctgggcaccctcacttggcgctggccacctgggccagcctggggccatggtctctctgcagctgaggcccagtggccccttgggcagtgatcggccctccccgcatcacagggccctggcagcaagcgggaaatgggggcgcacactgtgtgcttgggggtgctgcttgtttaccacacatgaccagactcccagcaggacagagctgctcagtactttacagaaaccaactgagtcgtttgtgcatgaattaagccggtctgcttccccgtcaccttcgtaacaaaacaacgtcccctctcccctcgcctcgagcagtttcttcaggacaccgtggctcgggctgctccctgctgccaggcacgctggttggctggcctgggcccggctcacgtgaagggcactggctcttgtgaccacactgagccacgtgcaagccgcagccgggcctggaagcctgaccctctggttctagggcttgtcccgcggagcctgcagagctagacgttggggtgtgtccgtgatgatatgggggccaggctgggagtagggcctttctagcagggttgggtggctcagtgagggtgtggaagtgggggacccacggggcctggctttgggactagacatgccagccccagctgggctggagggagcctgagtgagccccgacatacgctgggcctttcagctcgccgtgctctggtgacacacaggcggccaggttgggatttgtgtcaattctaggagccatcaagcatgaaagtggttctgtctcctgagcgcaagcctcgccggacccctgggcgaaggcctggacttgcagatgtgtgttccctgtgcgggtggacagagggggcccttatgacccacattgcagccccattccaccaccccttcctccccagagcagtctctgccgagggacagcacctgtgtcccttcgatgccacaacagccagttgaacaggggagccctttgctcaggcagcttctcctgcctctccctcctttctccttccctgccccatccccgtgcccttcttggcctgtggcgctggggagccatggtgtggcatactggggctcctgctccttgggccacttcctcagcccgggccccacaggcccaccacctgccagggctcccactgcactggctgtggcaggaggcttccccatgaccccgtgtggcccagctcggtgaggatgcagttctaggcacagcccctgggacagccagctgcctcccagaccacgtcagcctgctccagggtcctcagtcaccctgggccaggggccacgtgtcccatggatgtcgaccatgccaacgtcacattccagcaccccttttgcttgatggcgtctggtggtagtcagcatggtggacccacatcctacagccagaggtgatgttggacaaaggaaggggagtctggatgggtccttaaacgaccattctgtccgcagcggggtcattccttgtcagcccaagggagggccggggagtacactgatcccaacagctgggctgacacctcctttctcccctgcacggggaggattggcctgaggaccgtcaccctgtgcacagccccagtagggtggcagtgccactgtctccttgggccgttgcaggattgggcgggtgcagactccccttgcgggccccttgctcaatccccggccctcccagactcctccctctactgggggtaatttgtgtgtcagaagggctctggcagagctgtaaaatactgttttttaaaaattttagtccagatctttacttattagactgcagaaggagagctagggagagtgggggaagcccccttgcttttgtatctgtgaggtgaatgagggtctgtcacccaaatctacttctcagcccatgaccatagttctgttttccgtttgcaaatctcagtagctctgttttctccaaagtagaatgtgcgcaccggggtcctagccaggcgaggtcagtgtcggcaggctacctggtcattattgctgcctcgtccaggctgatgctgatggtcacaggcacggtggcatcagggagccgggccagcaggcggcgtgaggcggggccagcagctcactgcaagggcattttccacctgatcctggtgtgccccacatgcggtggcagggcagacgtgtgaagcctcggccgtctcggggctggcaggtgtgcgggtgaggaggccccggtggccaagcagagcctgcgtttcatttctcctgctgcactgtgtctagtctgtcttgtgaactctcaccgtgaaaagaggctagaagtccaggatcgctgtaccgctcctgtaattaggtgatgactggatttgacaacttagtcccctcagacaagtaagataccctccaacagcaaattcaatgacttaattggaaaacacacaagctggcatgatgtccggtgatttctgtaagaaatgcctgtaggagaaggtctgtgaagtgtggagggcagtgtcgacgctgcacagcatctgcagattcgcagcctcttctctgccggtgcctctgttcggttctgttacccaaaaacaaagaccaaagaaggccaatctctcatttgaccctgtctttttaatctgcctgttttaaaagttgcgtctgtagtagccgcttgctgtgaagacacatcttgacagtccaagtgattttgtgaccagtgatttgggtcctgttttccgctcttctaagaaaaaacaaaaagaccgtgagttattgcccagcaataatcatgttgttactgtgagttagcaacatgcctgacttcctgatagcattactgttttctagttttgtttattgtatattatgtgtggttttatttggtatttatttgtgttttgaggtcttgcaatgtttttgtgtttctgatgctaataactaaagtttgtaagactgtagaatgcaaaactcggagatgctaaactgtcttattagaggaaaataaatctgattatggagtctcaaaaaaaaaaaaaaaaaaaaaaaaaaa

SEQ ID NO: 2438 - DNA, 1204 bp, Homo sapien
cggaacgagggcaacctgcacagccatgcccgggcaagaactcaggacggtgaatggctctcagatgctcctggtgttgctggtgctctcgtggctgccgcatgggggcgccctgtctctggccgaggcgagccgcgcaagtttcccgggaccctcagagttgcactccgaagactccagattccgagagttgcggaaacgctacgaggacctgctaaccaggctgcgggccaaccagagctgggaagattcgaacaccgacctcgtcccggcccctgcagtccggatactcacgccagaagtgcggctgggatccggcggccacctgcacctgcgtatctctcgggccgcccttcccgaggggctccccgaggcctcccgccttcaccgggctctgttccggctgtccccgacggcgtcaaggtcgtgggacgtgacacgaccgctgcggcgtcagctcagccttgcaagaccccaagcgcccgcgctgcacctgcgactgtcgccgccgccgtcgcagtcggaccaactgctggcagaatcttcgtccgcacggccccagctggagttgcacttgcggccgcaagccgccagggggcgccgcagagcgcgtgcgcgcaacggggacgactgtccgctcgggcccgggcgttgctgccgtctgcacacggtccgcgcgtcgctggaagacctgggctgggccgattgggtgctgtcgccacgggaggtgcaagtgaccatgtgcatcggcgcgtgcccgagccagttccgggcggcaaacatgcacgcgcagatcaagacgagcctgcaccgcctgaagcccgacacggagccagcgccctgctgcgtgcccgccagctacaatcccatggtgctcattcaaaagaccgacaccggggtgtcgctccagacctatgatgacttgttagccaaagactgccactgcatatgagcagtcctggtccttccactgtgcacctgcgcgggggaggcgacctcagttgtcctgccctgtggaatgggctcaaggttcctgagacacccgattcctgcccaaacagctgtatttatataagtctgttatttattattaatttattggggtgaccttcttggggactcgggggctggtctgatggaactgtgtatttatttaaaactctggtgataaaaataaagctgtctgaactgttaaaaaaaaaaa

SEQ ID NO: 2439 - protein, 308 aa, Homo sapien
MPGQELRTVNGSQMLLVLLVLSWLPHGGALSLAEASRASFPGPSELHSEDSRFRELRKRYEDLLTRLRANQSWEDSNTDLVPAPAVRILTPEVRLGSGGHLHLRISRAALPEGLPEASRLHRALFRLSPTASRSWDVTRPLRRQLSLARPQAPALHLRLSPPPSQSDQLLAESSSARPQLELHLRPQAARGRRRARARNGDDCPLGPGRCCRLHTVRASLEDLGWADWVLSPREVQVTMCIGACPSQFRAANMHAQIKTSLHRLKPDTEPAPCCVPASYNPMVLIQKTDTGVSLQTYDDLLAKDCHCI

SEQ ID NO: 2440 - DNA, 2014 bp, Homo sapien
cagtgcggcggatgtacggatgattcagtggctggcaggaagcccgccctgcccgcccgccagtgtcagtggtgttggcatcagcttgggcaggtgtgcgggctcaggatggggcggccgtgttgaggaaccctggactctcagagatggaatttcaccgtgttgcctaggctggtctggagctcttgatctcaagcgatcctccctgcctcggcctcccaacgtgctgggattataggcgtgagccaccgctcctggccagggtctgttcctagttgcaacagttcttggaaacccactcgagagggccacgcctccattcaccaggccacgcatcacaagaggcaacaccaggagccaacatgagctcggggactgaactgctgtggcccggagcagcgctgctggtgctgttgggggtggcagccagtctgtgtgtgcgctgctcacgcccaggtgcaaagaggtcagagaaaatctaccagcagagaagtctgcgtgaggaccaacagagctttacggggtcccggacctactccttggtcgggcaggcatggccaggacccctggcggacatggcacccacaaggaaggacaagctgttgcaattctaccccagcctggaggatccagcatcttccaggtaccagaacttcagcaaaggaagcagacacgggtcggaggaagcctacatagaccccattgccatggagtattacaactgggggcggttctcgaagcccccagaagatgatgatgccaattcctacgagaatgtgctcatttgcaagcagaaaaccacagagacaggtgcccagcaggagggcataggtggcctctgcagaggggacctcagcctgtcactggccctgaagactggccccacttctggtctctgtccctctgcctccccggaagaagatgaggaatctgaggattatcagaactcagcatccatccatcagtggcgcgagtccaggaaggtcatggggcaactccagagagaagcatcccctggcccggtgggaagcccagacgaggaggacggggaaccggattacgtgaatggggaggtggcagccacagaagcctagggcagaccaagaagaaaggagccaaggcaaagagggaccactgtgctcatggacccatcgctgccttccaaggaccatttcccagagctactcaacttttaagcccctgccatggttgctcctggaaggagaaccagccaccctgaggaccacctggccatgcgtgcacagcctgggaaaagacagttactcacgggagctgcaggcccgtcaccaagccctctcccgacccaggctttgtggggcaggcacctggtaccaagggtaacccggctcctggtatggacggatgcgcaggatttaggataagctgtcacccagtccccataacaaaaccactgtccaacactggtatctgtgttcttttgtgctatgaatttggattcctaattgctattgttggttgctggggttttaaatgattgataagcttgtacagttaacttatagagggggagccatatttaacattctggatttcagagtagagatttctgtgttgtctcctagaaagcattacatgtagtttatttcagcatccttgttgggtggggccctggctctcttcccctttggtgggacctcccctttctttgggcttcagttcactcaggaagaaatgaggctgtcgccatctttatgtgcttccagtggaaatgtcacttgctacagacaatagtgcatgagagtctagagaagtagtgaccagaacagggcagagtaggtcccctccatggccctgaatcctcctctgctccagggctggcctctgcagagctgattaaacagtgttgtgactgtctcatgggaagagctggggcccagagggaccttgagtcagaaatgttgccagaaaaagtatctcctccaaccaaaacatctcaataaaaccattttagttgaaaaaaaaaaaaaaaaaa

SEQ ID NO: 2441 - protein, 243 aa, Homo sapien
MSSGTELLWPGAALLVLLGVAASLCVRCSRPGAKRSEKIYQQRSLREDQQSFTGSRTYSLVGQAWPGPLADMAPTRKDKLLQFYPSLEDPASSRYQNFSKGSRHGSEEAYIDPIAMEYYNWGRFSKPPEDDDANSYENVLICKQKTTETGAQQEGIGGLCRGDLSLSLALKTGPTSGLCPSASPEEDEESEDYQNSASIHQWRESRKVMGQLQREASPGPVGSPDEEDGEPDYVNGEVAATEA

SEQ ID NO: 2442 - DNA, 806 bp, Homo sapien
ggcacgagggcagaatggctcccgcaaagaagggtggcgagaagaaaaagggccgttctgccatcaacgaagtggtaacccgagaatacaccatcaacattcacaagcgcatccatggagtgggcttcaagaagcgtgcacctcgggcactcaaagagattcggaaatttgccatgaaggagatgggaactccagatgtgcgcattgacaccaggctcaacaaagctgtctgggccaaaggaataaggtgctaaagttatctgtattcgaaggtgaacttttgcaatgacaccagcttcacttaaccctgcaagagcccatatcagaatgtgccataccgaatccgtgtgcggctgtccagaaaacgtaatgaggatgaagattcaccaaataagctatatactttggttacctatgtacctgttaccactttcaaaagtaagttctccatcccataaagccatttaaattcattagaaaaatgtccttacctcttaaaatgtgaattcatctgttaagctaggggtgacacacgtcattgtaccctttttaaattgttggtgtgggaagatgctaaagaatgcaaaactgatccatatctgggatgtaaaaaggttgtggaaaatagaatgtccagacccgtctacaaaaggtttttagagttgaaatatgaaatgtgatgtgggtatggaaattgactgttacttcctttacagatctacagacagtcaatgtggatgagaactaatcgctgatcgtcagatcaaataaagttataaaattgccttcaaaaaaaaaaaaaaaaa

SEQ ID NO: 2443 - protein, 79 aa, Homo sapien
MAPAKKGGEKKKGRSAINEVVTREYTINIHKRIHGVGFKKRAPRALKEIRKFAMKEMGTPDVRIDTRLNKAVWAKGIRC

SEQ ID NO: 2444 - DNA, 1133 bp, Homo sapien
ggcacgaggccagggcgcgacgcgctgcggctcagcgacgcggcttctagaaccgggtgattgaactaaaccttcgccgcaccgagtttgcagtacggccgtcacccgcaccgctgcctgcttgcggttggagaaatcaaggccctaccgggcctccgtagtcacctctctatagtgggcgtggccgaggccggggtgaccctgccggagcctccgctgccagcgacatgttcaaggtaattcagaggtccgtggggccagccagcctgagcttgctcaccttcaaagtctatgcagcaccaaaaaaggactcacctcccaaaaattccgtgaaggttgatgagctttcactctactcagttcctgagggtcaatcgaagtatgtggaggaggcaaggagccagcttgaagaaagcatctcacagctccgacactattgcgagccatacacaacctggtgtcaggaaacgtactcccaaactaagcccaagatgcaaagtttggttcaatgggggttagacagctatgactatctccaaaatgcacctcctggattttttccgagacttggtgttattggttttgctggccttattggactccttttggctagaggttcaaaaataaagaagctagtgtatccgcctggtttcatgggattagctgcctccctctattatccacaacaagccatcgtgtttgcccaggtcagtggggagagattatatgactggggtttacgaggatatatagtcatagaagatttgtggaaggagaactttcaaaagccaggaaatgtgaagaattcacctggaactaagtagaaaactccatgctctgccatcttaatcagttataggtaaacattggaaactccatagaataaatcagtatttctacagaaaaatggcatagaagtcagtattgaatgtattaaattggctttcttcttcaggaaaaactagaccagacctctgttatcttctgtgaaatcatcctacaagcaaactaacctggaatcccttcacctagagataatgtacaagccttagaactcctcattctcatgttgctatttatgtacctaattaaaacccaagttaaaaaaaaaaaaaaaaaaaaaaaaaaaaaaa

SEQ ID NO: 2445 - protein, 198 aa, Homo sapien
MFKVIQRSVGPASLSLLTFKVYAAPKKDSPPKNSVKVDELSLYSVPEGQSKYVEEARSQLEESISQLRHYCEPYTTWCQETYSQTKPKMQSLVQWGLDSYDYLQNAPPGFFPRLGVIGFAGLIGLLLARGSKIKKLVYPPGFMGLAASLYYPQQAIVFAQVSGERLYDWGLRGYIVIEDLWKENFQKPGNVKNSPGTK

SEQ ID NO: 2446 - DNA, 2352 bp, Homo sapien
cagtgccaggctggaggcggcagcggttggaggcttcgcccggctttgcagcggggacttcggcggcggcgcctcaggcacctcggcccggacacgatgaggcgagtggtacgacagagcaagtttcggcatgtatttgggcaagcggtgaaaaatgaccagtgctatgatgacatccgggtttctcgtgtgacctgggatagttccttttgtgctgtcaatcccagatttgttgccataatcatagaggcaagtgggggaggagcgttccttgtcctccctctgcacaagactggtcgaattgacaaatcttaccctacagtatgtggccacacaggaccagtgctggacatagactggtgcccacataacgatcaggtcattgccagcggttcagaggactgcacggtcatggtatggcagatcccagaaaatggactcaccctttccctgactgaacctgtggtgattttggaaggccactcaaagagagtcggcatcgtggcttggcatccaacggcccgcaatgtgcttcttagtgcaggctgtgataatgccattatcatctggaatgtgggaacaggggaagcccttataaacttggacgatatgcattcagacatgatttacaatgtgagctggaaccggaatggcagtctgatctgcacagcttccaaagacaagaaagtgagagtcattgatcccaggaaacaagagattgttgctgagaaggagaaagcacatgaaggagcaagacccatgagagccatcttcctggccgatggcaatgtcttcaccactgggttcagccgcatgagcgagcggcagctggctctctggaatccgaaaaatatgcaggaaccaattgctcttcatgagatggacactagcaatggggtgttgctgcctttctatgaccctgacaccagcatcatttacttatgtggaaagggtgacagcagtattcgctattttgagatcacggatgaatccccgtacgtccactacctcaacacattcagcagcaaggagcctcagagagggatgggttacatgcccaagaggggacttgatgttaacaaatgtgagattgccagattcttcaaacttcatgagagaaagtgtgaacctattattatgactgttcccaggaagtctgaccttttccaagatgacctgtatcctgacacagcggggccagaggccgcgctggaggcagaagagtggttcgaaggcaagaatgcagacccaatcctcatctccttgaagcacgggtacattccaggcaaaaacagggatctcaaggtggtcaagaagaacattctggatagcaagcccactgcaaacaagaagtgcgacctgatcagcatccccaagaaaaccacagacacggccagtgtgcaaaatgaagccaagttggatgagattttaaaagagatcaaatctataaaagacacaatctgcaatcaagatgagcgtatttccaagttagaacagcagatggcaaagatagcagcctgaaggtcccacccccacccctacagaaaaaatgggagcaagaacttgtgcttgggagctggttattggtgtggtcctagggagggcggaaagggaggcactgccatttggagacattccatttcagatttgtcaaccagcgataggccacattccagtaagaactcaatttgtctcccaaatttgcagaaacaaaacgtgatttaaaagctgagctttttatcagaaagcttttttgatgttttaagtgttatgtgacttgttgaactttttaaaaagtgctacttttaaaatcccagatactctgaattttagaaaacaaactaattctgattgtgtcgtgcccaagtacccttttttttttaatgaatagggaccaatgccacattgctttttatatttctttcttttttaatgttgccaaaaccaaaagtagctttgttttcctttgtattttgctactttgcagtatttgtgtgtgtggttttttttccttaatttgaaagggacagcactgtgtatgtttataaactaaatgaagataagatattattttgtataaacattcatctgagaacaatcaaagcagtagccacatggtgctggctcctttgcagcacaaacctggtcattttgatgactgtacaacaggaagacttgaaaaatcacgtggattcatattaccaccgctctcatttcatggagtcttctgatcaaaaaagctcacgtcgtatttcttcttttcctttctcttttctagaaattgggtgtttgtaccagaatggaattttgcttctcggttatcctgtgcttcagatgattataatctaaccc

SEQ ID NO: 2447 - protein, 474 aa, Homo sapien
MRRVVRQSKFRHVFGQAVKNDQCYDDIRVSRVTWDSSFCAVNPRFVAIIIEASGGGAFLVLPLHKTGRIDKSYPTVCGHTGPVLDIDWCPHNDQVIASGSEDCTVMVWQIPENGLTLSLTEPVVILEGHSKRVGIVAWHPTARNVLLSAGCDNAIIIWNVGTGEALINLDDMHSDMIYNVSWNRNGSLICTASKDKKVRVIDPRKQEIVAEKEKAHEGARPMRAIFLADGNVFTTGFSRMSERQLALWNPKNMQEPIALHEMDTSNGVLLPFYDPDTSIIYLCGKGDSSIRYFEITDESPYVHYLNTFSSKEPQRGMGYMPKRGLDVNKCEIARFFKLHERKCEPIIMTVPRKSDLFQDDLYPDTAGPEAALEAEEWFEGKNADPILISLKHGYIPGKNRDLKVVKKNILDSKPTANKKCDLISIPKKTTDTASVQNEAKLDEILKEIKSIKDTICNQDERISKLEQQMAKIAA

SEQ ID NO: 2448 - DNA, 2121 bp, Homo sapien; identical to SEQ ID NO: 55

SEQ ID NO: 2449 - protein, 337 aa, Homo sapien; identical to SEQ ID NO: 56

SEQ ID NO: 2450 - DNA, 825 bp, Homo sapien
ggcacgagggcggctctgggctccggaatcgcccgcagccggtactgcgggacccactgcggatatggctgtcttggctggatccctgttgggccccacgagtaggtcggcagcgttgctgggtggcaggtggctccagccccgggcctggctggggttcccagacgcctggggcctccccaccccgcagcaggcccggggcaaggctcgcgggaatgagtatcagccgagcaacatcaaacgcaagaacaagcacggctgggtccggcgcctgagcacgccggccggcgtgcaggtcatccttcgccgaatgctcaagggccgcaagtcgctgagccattgaggatcgcgacgcagtcggcgggaccctcatggaagcatcgccctcgcctcggaccttgcctggcgctatttttgcagggagctggggagcaggaacgcctcggacctgagtgctctccatattgtggggttgaagtctggatgggagcttgccaagtccctttttaggctttttaattaggaagcatttcgaacctgcgcaacagaccaaagaacagtacaaagaacatccgtgtacccagtaccctgactaccgactacctacaacccgtccctgccccatcctgagttcttttgaagctgatctcaggcatcggattatttcttctgtaaatatttcagaatgtatctctccaagatgagagctcattaaaagacaattacaaagcttatcacatccaaaagaattatcaataattttgaaatattattaaacgtgtaataaatgttcaaagttccacttgcaaaaaaaaaaaaaaaaaa

SEQ ID NO: 2451 - protein, 92 aa, Homo sapien [sequence omitted]

SEQ ID NO: 2452 - DNA, 1579 bp, Homo sapien
gtctcgccctcttgcagtctgcagcttctcctgtcatcggaaatgccaggccaaggtggctgccccctgcgttcctccatccaaccatgagctggtgcccatcaccactgagaatgcaccaaagaatgtagtggacaagggagaaggaggctcccggggtggaaacacacggaaaagcctcgaggacaacggctccaccagggtcaccccgagtgtccagccccacctccagcccatcagaaacatgagtgtgagccggaccatggaggacagctgtgagctggacctggtgtacgtcacagagaggatcatcgctgtctccttccccagcacagccaatgaggagaacttccggagcaacctctctgagcggagacctgacatcacgaagctccatgccaaggtacaggaatttggctggcccgacctccacaccccagccctggagaagatctgcagcatctgtaaggccatggacacatggctcaatgcagaccctcacaatgtcgttgttctacacaacaagggaaaccgaggcaggataggagttgtcatcgcggcttacatgcactacagcaacatttctgccagtgcggaccaggctctggaccggtttgcaatgaagcggttctatgaggataagattgtgcccattggccagccatcccaaagaaggtacgtgcattacttcagtggcctgctctccggctccatcaaaatgaacaacaagcccttgtttctgcaccacgtgatcatgcacggcatccccaactttgagtctaaaggaggatgtcggccgtttctccgcatctaccaggccatgcaacctgtgtacacatctggcatctacaacatcccaggagacagccagactagcgtctgcatcaccatcgagccaggactgctcttgaagggagacatcttgctgaagtgctaccacaagaagttccgaagcccagcccgagacgtcatcttccgtgtgcagttccacacctgtgccatccatgacctgggggttgtctttgggaaggaggaccttgatgatgctttcaaagatgatcgatttccagagtatggcaaagtggagtttgtattttcttatgggccagagaaaattcaaggcatggagcacctggagaacgggccgagcgtgtctgtggactataacacctctgaccccctcatccgctgggactcctacgacaacttcagtgggcatcgagatgacggcatggaggaggtggtgggacacacgcaggggccactagatgggagcctgtatgctaaggtgaagaagaaagactccctgcacggcagcaccggggctgttaatgccacacgtcctacactgtcggccacccccaaccacgtggaacacacgctttctgtgtatttatatagatggaaatatactttatattttgtatcatcgtgcctatagccgctgccaccgtgtataaatcctggtgtatgctccttatcctggacatgaatgtattgtacactgacgcgtccccactcctgtacagctgctttgtttctttgcaatgcattgtatggctttataaatgataaagtt

SEQ ID NO: 2453 - protein, 398 aa, Homo sapien
MSVSRTMEDSCELDLVYVTERIIAVSFPSTANEENFRSNLSERRPDITKLHAKVQEFGWPDLHTPALEKICSICKAMDTWLNADPHNVVVLHNKGNRGRIGVVIAAYMHYSNISASADQALDRFAMKRFYEDKIVPIGQPSQRRYVHYFSGLLSGSIKMNNKPLFLHHVIMHGIPNFESKGGCRPFLRIYQAMQPVYTSGIYNIPGDSQTSVCITIEPGLLLKGDILLKCYHKKFRSPARDVIFRVQFHTCAIHDLGVVFGKEDLDDAFKDDRFPEYGKVEFVFSYGPEKIQGMEHLENGPSVSVDYNTSDPLIRWDSYDNFSGHRDDGMEEVVGHTQGPLDGSLYAKVKKKDSLHGSTGAVNATRPTLSATPNHVEHTLSVYLYRWKYTLYFVSSCL

SEQ ID NO: 2454 - DNA, 2427 bp, Homo sapien
cggacgcgtggggagaggctgtttaccagaacagcataacaagggcaggtctgactgcaaggctgggactgggaggcagagccgccgccaagggggcctcggttaaacactggtcgttcaatcacctgcaagacgaaggaggcaaggatgctgttggcctgggtacaagcattcctcgtcagcaacatgctcctagcagaagcctatggatctggaggctgtttctgggacaacggccacctgtaccgggaggaccagacctcccccgcgccgggcctccgctgcctcaactggctggacgcgcagagcgggctggcctcggcccccgtgtcgggggccggcaatcacagttactgccgaaacccggacgaggacccgcgcgggccctggtgctacgtcagtggcgaggccggcgtccctgagaaacggccttgcgaggacctgcgctgtccagagaccacctcccaggccctgccagccttcacgacagaaatccaggaagcgtctgaagggccaggtgcagatgaggtgcaggtgttcgctcctgccaacgccctgcccgctcggagtgaggcggcagctgtgcagccagtgattgggatcagccagcgggtgcggatgaactccaaggagaaaaaggacctgggaactctgggctacgtgctgggcattaccatgatggtgatcatcattgccatcggagctggcatcatcttgggctactcctacaagagggggaaggatttgaaagaacagcatgatcagaaagtatgtgagagggagatgcagcgaatcactctgcccttgtctgccttcaccaaccccacctgtgagattgtggatgagaagactgtcgtggtccacaccagccagactccagttgaccctcaggagggcagcaccccccttatgggccaggccgggactcctggggcctgagcccccccagtgggcaggagcccatgcagacactggtgcaggacagcccaccctcctacagctaggaggaactaccactttgtgttctggttaaaaccctaccactcccccgcttttttggcgaatcctagtaagagtgacagaagcaggtggccctgtgggctgagggtaaggctgggtagggtcctaacagtgctccttgtccatcccttggagcagattttgtctgtggatggagacagtggcagctcccacagtgatgctgctgctaagggcttccaaacattgcctgcacccctggaactgaaccagggatagacggggagctcccccaggctcctctgtgctttactaagatggcctcagtctccactgtgggcttgagtggcatacactgttattcatggttaaggtaaagcaggtcaagggatggcattgaaaaaatatatttagtttttaaaatatttgggatggaactccctactgacctctgagaactggaaacgagtttgtacagaagtcagaactttgggttgggaatgagatctaggttgtggctgctggtatgcttcagcttgctggcaatgatgtgccttgacaaccgtgggccaggcctgggcccagggactcttcctgtttcataaggaaaggaagaattgcactgagcattccacttaggaagaggatagagaaggatctgctccgcctttggccacaggagcagaggcagacctgggatgccccagtttctcttcagggatggatagtgacctgtcttcattttgcacaggtaagagagtagttagctaacctatgggaattatactgtggggccttgtgagctgcttctaagaggctaacctggaaactaagctcagaggcaaggtaataaagcacttcagggcttgctccccaagtgggcctgatttagcaggtggtcctgcgggcgtccaggtcagcaccttcctgtagggcactggggctagggtcacagcccctaactcataaagcaatcaaagaaccattagaaagggctcattaagccttttggacacaggaccccagagaggaaaaagtgacttgcccaaggtcgtaagcaagctactggcatggcaagagcccagcttcctgacggagcgcaacatttctccactgcactgtgctagcagctcagcagggcctctaacctgtgatgtcacactcaagaggccttggcagctcctagccatagagcttcctttccagaacccttccactgcccaatgtggagacaggggttagtggggctttctatggagccatctgctttggggacctagacctcaggtggtctcttggtgttagtgatgctggagaagagaatattactggtttctacttttctataaaggcatttctctatatacatgttttatatacctcattctgacacctgcatatagtgtgggaaattgctctgcatttgacttaattaaaaaaaaaaaaaaa

SEQ ID NO: 2455 - protein, 263 aa, Homo sapien
MLLAWVQAFLVSNMLLAEAYGSGGCFWDNGHLYREDQTSPAPGLRCLNWLDAQSGLASAPVSGAGNHSYCRNPDEDPRGPWCYVSGEAGVPEKRPCEDLRCPETTSQALPAFTTEIQEASEGPGADEVQVFAPANALPARSEAAAVQPVIGISQRVRMNSKEKKDLGTLGYVLGITMMVIIIAIGAGIILGYSYKRGKDLKEQHDQKVCEREMQRITLPLSAFTNPTCEIVDEKTVVVHTSQTPVDPQEGSTPLMGQAGTPGA

SEQ ID NO: 2456 - DNA, 1634 bp, Homo sapien
cggaggagagcgcaggaggaaacagtaccggctggaggccggtcttgcaggagcgggggactgctgggggcggggcttggtggtgactgctggcggggcggggcctggggctcagaggggtgggctttggagatcagagggtcgacgctgcttcgttgcctggactctggtttccgccctggagcaagccggggcctggtcggcagctgggccgccatggagtccacgctgggcgcgggcatcgtgatagccgaggcgctacagaaccagctagcctggctggagaacgtgtggctctggatcacctttctgggcgatcccaagatcctctttctgttctacttccccgcggcctactacgcctcccgccgtgtgggcatcgcggtgctctggatcagcctcatcaccgagtggctcaacctcatcttcaagtggtttctttttggagacaggcccttttggtgggtccatgagtctggttactacagccaggctccagcccaggttcaccagttcccctcttcttgtgagactggtccaggcagcccttctggacactgcatgatcacaggagcagccctctggcccataatgacggccctgtcttcgcaggtggccactcgggcccgcagccgctgggtaagggtgatgcctagcctggcttattgcaccttccttttggcggttggcttgtcgcgaatcttcatcttagcacatttccctcaccaggtgctggctggcctaataactggcgctgtcctgggctggctgatgactccccgagtgcctatggagcgggagctaagcttctatgggttgactgcactggccctcatgctaggcaccagcctcatctattggaccctctttacactgggcctggatctttcttggtccatcagcctagccttcaagtggtgtgagcggcctgagtggatacacgtggatagccggccctttgcctccctgagccgtgactcaggggctgccctgggcctgggcattgccttgcactctccctgctatgcccaggtgcgtcgggcacagctgggaaatggccagaagatagcctgccttgtgctggccatggggctgctgggccccctggactggctgggccacccccctcagatcagcctcttctacattttcaatttcctcaagtacaccctctggccatgcctagtcctggccctcgtgccctgggcagtgcacatgttcagtgcccaggaagcaccgcccatccactcttcctgacttcttgtgtgcctccctttcctttccctcccacaaagccaacactctgtgaccaccacactccaggaggcagccccatccccttccagcccctaagtaggccctcccctccctaaatctgcttccgcaccacctggtcttagccccaaagatgggccttctctctcccagataagttggtcctccctctgcctttcctctcaagcccccaaagagcaaaggcaacagcaagaccagcgggttcttgcaacactgtgaggggcagccagggcggccccaataaagcccttgaatactttgaaaaaaaaaaaaaaaaaaaaaaaaaaaaaaaaaaaaaaaaaaaaaaaaaaaaaaaaaaaaaaaaaaaaaaaaaaaaa

SEQ ID NO: 2457 - protein, 346 aa, Homo sapien
MESTLGAGIVIAEALQNQLAWLENVWLWITFLGDPKILFLFYFPAAYYASRRVGIAVLWISLITEWLNLIFKWFLFGDRPFWWVHESGYYSQAPAQVHQFPSSCETGPGSPSGHCMITGAALWPIMTALSSQVATRARSRWVRVMPSLAYCTFLLAVGLSRIFILAHFPHQVLAGLITGAVLGWLMTPRVPMERELSFYGLTALALMLGTSLIYWTLFTLGLDLSWSISLAFKWCERPEWIHVDSRPFASLSRDSGAALGLGIALHSPCYAQVRRAQLGNGQKIACLVLAMGLLGPLDWLGHPPQISLFYIFNFLKYTLWPCLVLALVPWAVHMFSAQEAPPIHSS

SEQ ID NO: 2458 - DNA, 5019 bp, Homo sapien
agtgctcgcggggccgcggcggagtgtaccgtgctgctctactcgctgccattcgcccgcaggtcggcgcgctcgcccacctgagccgcgccggggctgcgggaccgtgggacagcgcgctcagcccagcctaggaaagaggcagcagtctcagcgcggagatggggagcgggcgaagttgacgagtctcccgcccacgctgcgcccctcctgcccagaggggctgcagccagcggtctgtcgcgcgtgcctgtgtgcccgaggagccgccccggggagaagacccggcgcggagttgttcccccagggaggatccgcagcccagccgagggggtcgggcggcctggctacgcaggacccagccccgcagccgcggactcccagcggcggcgaagtttggctgctgagcggcgcggcgccggaccactggacagcgggagcgatgcccgtggggggcctgttgccgctcttcagcagccccgcgggcggcgtcctgggcggggggctcggcggcggcggtggcaggaaggggtcgggccccgccgccctccgcctgacggagaagttcgtgctgctgctggtattcagcgccttcatcacgctctgcttcggggcgatcttcttcctgccagactcctccaagctgctcagcggggtcctgttccactccagccccgccttgcagccggccgccgaccacaagcccgggcccggggcgcgcgccgaggacgcggccgaggggcgagcccggcgccgcgaggagggggcacccggggacccggaggccgccctggaggacaacttggccaggatccgcgaaaaccacgagcgggctctcagggaagccaaggagaccctgcagaagctgcccgaggagatccaaagagacatcctactggagaagaagaaggtggcccaggaccagctgcgtgacaaggcgccgttcagaggcctgcccccggtggacttcgtgcccccaatcggggtggagagccgggagcccgccgacgccgccatccgcgagaaaagggcaaagatcaaagagatgatgaaacatgcttggaataattataaaggttatgcctggggattaaatgaactcaaacctatatcaaaaggaggccattcaagcagtttgtttggtaacatcaaaggagcaactatagtagatgccctggatacactttttattatggaaatgaaacatgaatttgaagaagcaaaatcatgggttgaagaaaatttagattttaatgtgaatgctgaaatttctgtctttgaagtaaatatacgctttgttggtggactactctcagcctactatctgtctggagaagagatttttcgaaagaaagcagtggaacttggggtaaaattgctacctgcatttcatactccctctggaataccttgggcattgctgaatatgaaaagtggtattggaaggaactggccctgggcctctggaggcagcagtattctggcagaatttggaaccctgcatttggagtttatgcacttgagccacttatcaggaaaccccatctttgctgaaaaggtaatgaatattcgaacagtactgaacaaactggaaaaaccacaaggcctttatcctaactatctgaatcccagtagtggacagtggggtcaacatcatgtatcagttggaggacttggagacagcttctatgagtatttgctgaaggcctggttaatgtctgacaagacagatctggaagctaagaagatgtattttgatgctgttcaggctatcgagactcatttgatccgcaagtctagcagcggactaacttatatcgcagagtggaaagggggcctcctggagcacaagatgggccacctgacctgcttcgctgggggcatgttcgcactcggggctgatgcagctcccgaaggcatggcccaacactaccttgaactcggggctgaaattgcccgtacttgtcatgaatcatataatcgaacatttatgaaactgggaccagaagctttcagatttgatggtggtgttgaagccatcgctacaagacaaaatgaaaaatactacatcttacggccagaagttatggagacttacatgtatatgtggagactgactcatgatccaaagtacaggaaatgggcctgggaagccgtagaggccttggaaaaccattgcagagtgaatggaggctattcaggcctaagggatgtttaccttcttcatgagagttatgatgatgtgcagcagagtttcttcctgggcagagacattgaaatatttgtacctaatattttctgacgacgatcttcttccactggagcattggatcttcaatagcgaggcacatcttctccctatcctccctaaagataaaaaggaagttgaaatcagagaggaataaaaagacattttatattttattctgctccattcccttcactgtataccttaataattccttttctggtaatcaggcacatgatgaactttgattagtaggtctgtgattaagttcttaaattgttttgcagtcttttatgtttattatcataggtataggtggacctaaattccttatcatatcctttattaattcagccagtgtatccaccagttttttgtttatgtttttaagtaacctattatctctggatttcatgaaggtgtaatatcgtttttgttaaactgaatagaattgtatagcgatgacttcttaattataatttgatttgactgcaaaactttttcctcctctaagaggagatgatgtctgctttaagctgtaatgttttgccatgttgcaaaaagccataataataagtataaaaaagctttttcctttacaatttcatgttaatctggtttgtctgtccaccagagacagatcttctgtgacagcctccttatgcaggtctatcattatttgatagaatgtcttctaaaatacttcactcacattgtaattcaaattagaaagtcattccaaaaggatcatgtcatgttgacctcatttcatcggaactgcagtatatttttgttggttaattatattagtgttttctattttgtaaatgtgtcctttaattttactttaaatgccctgtgtcatttctggattatatactagttaatttcttccattccccactacacagagaggtgagctttcaaattttgcagagctctgctatcactgaattacatttatctgaagaaaatagtacaacttaatggattagcttttgggtttaactgaatatatgaagaaattgggtctgtctaaagagagggtatttcatatggcttttagttcacttgtttgtatttcatcttgatttttttctttggaaaataaagcattctatttggttcagatttctcagatttgaaaaaggctctatctcagatgtagtaaattatttcctttcagtttgtgaaagcaggatttgactctgaaagaagctttgccaattttacttattcgtgatcaatcaaggaaaatctaataaattttaggccaaataagaatatagcatatttagtatggttatagtcaacacagagatcacaacttagaagaaatataaagaaatggccactccccatcccccacagtcctggagtaaatcaaaatcaatatatgattcttttaaacattaagtttgaaataggaatggttttctcaagaatagatttggtgtgataccttgtgtttgcttacattggcccactatatatacatatatatttatgtagatatacttccatgaaagggctaatacgatgcatatactgaagggcaaggactttgaccatgtgaattttcagccgagaatggtcagaaagatcagtacaaccccatggattaggctgaaacatatgaaattgctgcatttgtagtttaaaaactgtcagcagtttcatatggttccacctaatattattgaagacaattattttcttagctatcaataggcttaatagttttagttattttagcttttgaaagtgttttaaaagatttcctttatcggacaggaccatctttatgacctgctttctgtttttcaatatcatacattggtgtatgtcaaagaataaattagtaaaattagtaaatgaaaaagactcttccgtacatcattatttccatgctaatgtgtgtctgtgatccagaataacttctcccactcatatcttcagttcacctaatgaaatgaatggatagcaagagccctttgttcccaggactttaaggcaaaatattaaaaattattgccaaaattaagaatataatgtttgtataaatgtccttgaatttgccatttaaattaactcattttcttttcactttgatttgaaagctgataagtatttctgcagcagatagaatattaaaatcaggttgtgtgtacacactgcactatgaggtaccttggtgtcctggtgtgaatagacaagaagctgtactatatgttgctctctcagtggcaacaatgaagtttttgcaattctagaacttggatttttttttaacaaaagtcccaaaacaccaaaaatgtaaacaagataagagattaatattgtagtgatgtaatttaattaaagttatattttgggttaattttaacaactgaagtcttattgttgaaacttattttcaacaaaactgtgcagttaaatttgtatacgtattcacatactgaaagatgaaccgttaaaatagcacttaattttgtgtttcttcaatatgtcttgatatactttgtgcaattaatattacacatgtaagttgtatggcagtttacagaactcaatgacttgtcatgaggttttcatatgagctacacattgtgtacattgattgttttttatttttacataaatccattctgtcattttcaactttatatataaatctccaatgttatgggaaacaatagattgacacataatttttaaaaattatatttgtaaaatttctctattgtgaataaagtcttttaatatatctc

SEQ ID NO: 2459 - protein, 766 aa, Homo sapien
VLAGPRRSVPCCSTRCHSPAGRRARPPEPRRGCGTVGQRAQPSLGKRQQSQRGDGERAKLTSLPPTLRPSCPEGLQPAVCRACLCARGAAPGRRPGAELFPQGGSAAQPRGSGGLATQDPAPQPRTPSGGEVWLLSGAAPDHWTAGAMPVGGLLPLFSSPAGGVLGGGLGGGGGRKGSGPAALRLTEKFVLLLVFSAFITLCFGAIFFLPDSSKLLSGVLFHSSPALQPAADHKPGPGARAEDAAEGRARRREEGAPGDPEAALEDNLARIRENHERALREAKETLQKLPEEIQRDILLEKKKVAQDQLRDKAPFRGLPPVDFVPPIGVESREPADAAIREKRAKIKEMMKHAWNNYKGYAWGLNELKPISKGGHSSSLFGNIKGATIVDALDTLFIMEMKHEFEEAKSWVEENLDFNVNAEISVFEVNIRFVGGLLSAYYLSGEEIFRKKAVELGVKLLPAFHTPSGIPWALLNMKSGIGRNWPWASGGSSILAEFGTLHLEFMHLSHLSGNPIFAEKVMNIRTVLNKLEKPQGLYPNYLNPSSGQWGQHHVSVGGLGDSFYEYLLKAWLMSDKTDLEAKKMYFDAVQAIETHLIRKSSSGLTYIAEWKGGLLEHKMGHLTCFAGGMFALGADAAPEGMAQHYLELGAEIARTCHESYNRTFMKLGPEAFRFDGGVEAIATRQNEKYYILRPEVMETYMYMWRLTHDPKYRKWAWEAVEALENHCRVNGGYSGLRDVYLLHESYDDVQQSFFLGRDIEIFVPNIF

SEQ ID NO: 2460 - DNA, 3931 bp, Homo sapien
  Unsure 2912: Unknown base
ccggcggcgagacggagaggcggcggaggtgccgcgcgcaggatctggtgggcggccgcgaggctcgggagaggcgaaccggagcgcgggaccgcggtcgccccgaccagagccgggagaccgcagcacccgcagccgcccgcgagcgcgccgaagacagcgcgcaggcgagagcgcgcgggcgggggcgcgcaggccctgcccgccccttccgtccccacccccctccgccctttcctctccccaccttcctctcgcctcccgcgcccccgcaccgggcgcccaccctgtcctcctcctgcgggagcgttgtccgtgttggcggccgcagcgggccgggccggtccggcggggccgggggatggcgctgctggacctggccttggagggaatggccgtcttcgggttcgtcctcttcttggtgctgtggctgatgcatttcatggctatcatctacacccgattacacctcaacaagaaggcaactgacaaacagccttatagcaagctcccaggtgtctctcttctgaaaccactgaaaggggtagatcctaacttaatcaacaacctggaaacattctttgaattggattatcccaaatatgaagtgctcctttgtgtacaagatcatgatgatccagccattgatgtatgtaagaagcttcttggaaaatatccaaatgttgatgctagattgtttataggtggcaaaaaagttggcattaatcctaaaattaataatttaatgccaggatatgaagttgcaaagtatgatcttatatggatttgtgatagtggaataagagtaattccagatacgcttactgacatggtgaatcaaatgacagaaaaagtaggcttggttcacgggctgccttacgtagcagacagacagggctttgctgccaccttagagcaggtatattttggaacttcacatccaagatactatatctctgccaatgtaactggtttcaaatgtgtgacaggaatgtcttgtttaatgagaaaagatgtgttggatcaagcaggaggacttatagcttttgctcagtacattgccgaagattactttatggccaaagcgatagctgaccgaggttggaggtttgcaatgtccactcaagttgcaatgcaaaactctggctcatattcaatttctcagtttcaatccagaatgatcaggtggaccaaactacgaattaacatgcttcctgctacaataatttgtgagccaatttcagaatgctttgttgccagtttaattattggatgggcagcccaccatgtgttcagatgggatattatggtatttttcatgtgtcattgcctggcatggtttatatttgactacattcaactcaggggtgtccagggtggcacactgtgtttttcaaaacttgattatgcagtcgcctggttcatccgcgaatccatgacaatatacatttttttgtctgcattatgggacccaactataagctggagaactggtcgctacagattacgctgtgggggtacagcagaggaaatcctagatgtataactacagctttgtgactgtatataaaggaaaaaagagaagtattataaattatgtttatataaatgcttttaaaaatctaccttctgtagttttatcacatgtatgttttggtatctgttctttaatttatttttgcatggcacttgcatctgtgaaaaaaaaaaaaaacacatctgtagtcttggccaaatgatacactttattttgtggaagtagagaatcaagagaattggttctaggaacctgggttcgttcatcattgttgtttatttttttaaaataaataaataaatatatatatagatgctctgcaacaaactctgtgacagtatccttcagtagagaaagtttcttacttgtgagtacactcttttagaacatttacgggtggcagcagctttgctttagagtttagaagataatagaaggaatgactattcatgtccaaagtgaatggttttgtgcagtgaacaacacatggcgaggtactaactgagaaactttttcatgctttatgcctacctcttgtagttgttgcagagcaaatacaaattgtaataagatagctaggccttgcagaaacaaacagaaaaacttaaaaaaaaatgatataagagctggagtctagtatttatatgaatctgtgagagataatttttttggtctcactgcaatgaaccaaaagcggctgagtttggtttttaattgtagccatgtattgaaggcatctttttgaccaactcttgttggttctgtcttgaaccattgttaatcactgtgctgtaattagtatagctaaatcttttccttccttgctcctcccccagcccaccccgtcttcccttaacattttttcagggggggttgggagtggtttcattttagtgtgagtggatgttttgatagttgtaaggaaaaaatgcatttcagacacatttcacacatgagctattttcttacacagtatgtcttattgttaataagaatgtaatttcatgatacaagtatttaataccttttttaagtcagtaaatattctagccatcaataaattgcagtagagtattaagaggggacaggatgagtttactcttaaaattaatcagtatcaaactaagtctactgtgtgtgttttttttttttgttttttgtttttgtttgtttactattatagtaagtctagtcttatttaaattggatttttgtattcaagtttatatgacaaaatagactagatcagcgctggttgtaaatgcatgctgtacctcactgttttctccccatcatgccgctaaacttgctcgccaggttgtgcttaacttgtggtgaactggacttgattctgttttgttttgtttttttaaanaaaaaaacaaaaatgtaagggacagtgcataagccttttctttgttaagtagtggtgttttgctttttcttcaggattggatggcatgttgtccacaggaatgcctactgcagggctaacactggcaatatggcagctttaaattctgagttactacagtctccatgtcaaagcataatgtgtagcatatcagcaataactacatatttatagaaaacactttttcactttactgagccaattcatttaattgtcaaatgtctatatccatggtttaaatggcaacatatctataagtatgtatacacattatatttaagcttttctctgggccaaactgcttcatccttttttctttcttttttttttttgtatagccttatgatgaatttgtttgaagggcattttctttatgaacaaaggcttggatgcatattcctttctttctgtgaatgggtattattccctgaggaaagttgcacagtgaaaaccagtctggttgtgacccactacatgttttgtttttaatcactattacctgagttgaactttgctcaccatgtttgtacttgttggtctgtttaatgaagtttggttgatgccatcctttgcactgccgaagcgtaatcttgtgtattacttagctctctgctgatctcagtatggacagtgtaacaacaaaaccaaaatggctggacagacttcttgtgttttgtaaatataaactaggacagttctgtaggtttgttcagtgtgctagtggagtatttccttaatgtaaaacttcacttaacagagagattctttgtttagcaagcttggagtgatgataaaatggtaagaaataatataaatgttgaagaaagcatcacaacagaactataggagtctaaatttaataaatctttaaaaaaaaccagtgtctagaatatataccatgttttattatttaaaatcattgtcttaaatttttgttcaaaaaataaaaatttgaatacaatcaaaaaaaataagtataa

SEQ ID NO: 2461 - protein, 514 aa, Homo sapien
RRRDGEAAEVPRAGSGGRPRGSGEANRSAGPRSPRPEPGDRSTRSRPRARRRQRAGESARAGARRPCPPLPSPPPSALSSPHLPLASRAPAPGAHPVLLLRERCPCWRPQRAGPVRRGRGMALLDLALEGMAVFGFVLFLVLWLMHFMAIIYTRLHLNKKATDKQPYSKLPGVSLLKPLKGVDPNLINNLETFFELDYPKYEVLLCVQDHDDPAIDVCKKLLGKYPNVDARLFIGGKKVGINPKINNLMPGYEVAKYDLIWICDSGIRVIPDTLTDMVNQMTEKVGLVHGLPYVADRQGFAATLEQVYFGTSHPRYYISANVTGFKCVTGMSCLMRKDVLDQAGGLIAFAQYIAEDYFMAKAIADRGWRFAMSTQVAMQNSGSYSISQFQSRMIRWTKLRINMLPATIICEPISECFVASLIIGWAAHHVFRWDIMVFFMCHCLAWFIFDYIQLRGVQGGTLCFSKLDYAVAWFIRESMTIYIFLSALWDPTISWRTGRYRLRCGGTAEEILDV

SEQ ID NO: 2462 - DNA, 2130 bp, Homo sapien
actcgcgggtaacttgcttttgggagccagcggtatggcgtcgggctgcaagattggcccgtccatcctcaacagcgacctggccaatttaggggccgagtgcctccggatgctagactctggggccgattatctgcacctggacgtaatggacggacatgcacatgatggtgtccaagccagaacagtgggtaaagccaatggctgtagcaggagccaatcagtacacctttcatctcgaggctactgagaacccaggggctttgattaaagacattcgggagaatgggatgaagtcttgctctgtcacccaggctgaagtgcagtggcacagtcagggcccattgcaggttggccttgccatcaaaccaggaacctcagttgagtatttggcaccatgggctaatcagatagatatggccttggttatgacagtggaaccggggtttggagggcagaaattcatggaagatatgatgccaaaggttcactggttgaggacccagttcccatctttggatatagaggtcgatggtggagtaggtcctgacactgtccataaatgtgcagaggcaggagctaacatgattgtgtctggcagtgctattatgaggagtgaagaccccagatctgtgatcaatctattaagaaatgtttgctcagaagctgctcagaaacgttctcttgatcggtgaaaccataaggagcccagtgttcctgttcatgaaatctcccttttactggaaaacaggaatattgactaccaaatcacaatgcaattgaagccgtactgcttttttgagcagttattcattccagtgattaaaactgattgtgcagaatattctaagaggtcagaaattggtgtgtataactacatttttagtgatgcaatttattgattagtgagtaagatactgtttttattgagagatttgatttttataaagtaaaaatacggctgcattagggttacaaacagaaaagtgtcttaatgtctaaggagggcatattagctacactacaaaaacaaattttgtctgtacttctgaaaagaattttgttgtttctcagctgttttccaaaagcaaaggaagtctttatggtttttttctatttcatgttattgtgatttgtttataagtttgggtggggtgcataccatattcttggttcttaaaatctatcacttttcaccttatacttgatgtgtgaaaactataaaaacaatgtgtgaaacccaggggttctaaaatacaagcatagattttatcagggtgttttgtcaaagcaggttattcagtgattcctccccaccattcttaagaacgttaaataatgctgttgtgttagctctgagtagaaaggaaaaagtaaaacctctgtttggaggtaatattgggttgaattctgactgcccctttctagctggacctttaacaaatcacccaatcttttttgtgtttctctaaagtcatttatacattaaatgtaattatagcaactgtggggttctgttgagaattaagagctaacactatatatgtaaagtttccagtactagtcccagaatttagaatatgctcaacacaaagtaaacagcattatataagtttatatttttgtgagttataaagtactttgatatattctcattaaatctgtaaatcacctctataagtaagtggtaataataaagcagatatttttgtccccatttaaaaaatgaagaaattaatgcttaatagggtggtaccctggaaaggatctgggaagtggtagaatttctggtctgtacttttacaaatggagcccttgggaggtgggttaggtaaaagaagctttttacttaacgttgtcttatttccagtctaattttacgctgtagcagaaccagatggctgagaaaattctggaactatggatcttgaccccaaggatatattattttattccaagaaagatcaggtaggcgaaaagatgacaggatacagagtcaatccataaactaaatatttataactgttctgaattatacagagtctaaaaatatgtgtcagctacttcattcctgtaaatactcttgctgtgttataaatatggcaagaaataaacatgaccaatatcaat

SEQ ID NO: 2463 - protein, 178 aa, Homo sapien
MHMMVSKPEQWVKPMAVAGANQYTFHLEATENPGALIKDIRENGMKSCSVTQAEVQWHSQGPLQVGLAIKPGTSVEYLAPWANQIDMALVMTVEPGFGGQKFMEDMMPKVHWLRTQFPSLDIEVDGGVGPDTVHKCAEAGANMIVSGSAIMRSEDPRSVINLLRNVCSEAAQKRSLDR

SEQ ID NO: 2464 - DNA, 7480 bp, Homo sapien
ctccacagtacctgaatggagagcgaaagataatgatctacgattactgctgacaaatggaagaataattaaagatgaaaggcagccctttgcagatcaaagtctttatacagcagatagtgaaaatgaagaggataaaagaaggacaaaaaaggcaaaaatgaagatagaagagagttcaggagtagagggagtggaacatgaagaatctcaaaaaccactgaatgggttttttacaagtgtgaaatcagaactcaggagtagatcatcaggatattctgatatttctgagtcagaagactccggacccgagtgcactgcactgaaaagtatctttaccactgaagagtctgaaagttcaggtgatgaaaagaaacaagaaataacatccaactttaaggaggaatctaatgtgatgaggaacttccttcaaaagagccagaagccatctagaagtgaaattccaattaaaagggaatgtcctacctcgacgagcacagaggaagaagctattcagggcatgctgtctatggcagggttgcactattccacgtgtttacaaaggcaaatacaaagcacagactgcagtggtgaaagaaactctctccaggatcccagcagctgccatggcagtaaccatgaggttaggcagttgtatcgctatgataaaccagtggaatgtggataccatgtcaagactgaagatccagacttgaggacttcctcctggattaaacagtttgatacttccagatttcatcctcaggatctaagtagaagccagaaatgcatcagaaaggaaggttcatcagaaattagtcagagggtacaaagtaggaattatgtggacagcagcggctcaagccttcagaatggaaagtatatgcagaattcaaacctgacttcgggggcgtgccagataagtaatggcagtctaagcccagaaaggccagttggtgaaacttccttctcggtgccccttcaccccaccaagagaccggcatcaaatccaccacctatcagcaaccaggcaacaaaaggtaaacgtccaaaaaaaggaatggcaacagccaaacaacgtcttgggaagatccttaagttgaacagaaatggccatgcacgtttctttgtgtgacagagctgctgttgcagccattcttccctttggagaccagtctaggggtgcaggagcctggagcttccgctgtccccctgcctggagcagtttgtgtgtatagtaagaacactgcccgaagaacagaatgaacctgatgctgcattttcactgtgccacacccactcagcaataaccattttggacctggtgggggagaggaagaaggagggtagaaccttaaaaagagaccttgaactggaaagggtctcttgtcagggcttgaattttattttgttgttggtagtgtcttgatgtattttcagtggtagggtaaagaattatcaataatttatttaacagatttttttttaaagttaacagcttttaaattctttttttaaagctatttatttggaagatttctggagaaatatctcactaatttagatgtaagaatgtgaaggtttttaaattatttttgatagtgtgtgtgttacatgtggggaagggccacagtaacagtaactagtctggactcttaaatttgatattcaggttaaagtcttaaacagggatttgatgcattaattattttaaattaagatgtatatgaaaatcattttattttatatatttcatgtgttttttataagctattagcttcgcttttgctaacatccaaggtgcatactgttatccaggttgattaccttatatcccaccttccctctgcactccccatcattttgtgatgacccagtaagactcttctctttgcagggaaacactttcgtagccaatgtgtaagaactccatgaaagatccctcatttctcatttcgtttgacattgtgattttcttctcaacattaaaaaaaataggcttttgcattttcatttctgctgatgatatctgggtcccaaagagagcagctttaatatatttttcctacttgtgggaaaagtattataagtttggttaaattgtcatgtttatagtttttccaagtacatttgtaactacagcaggccttcttcgtactgctgctgttggacaacaggactggcacctgctgcagaggttataccttatgatacttttatgctccatacctgatttgttgggaaatgttatttaggatattcaaatctgcatcataagccgtaatataataggattaatactacattaagttgtatagaagcaagcatgttggaatagatcttttgtgtgtatttactttttttatttcttaattttctaaagaattacttaagatatggatttggagtaaaatgggtgcttttggcagtttcttccatctatcctaacctgaccagtacatattgaggttaagtatctggttaaactttaaggtattcatttatctcctttatgtatgatttttactaaatgccagttttcatttgcttatagtagcttctattttcccttttttccatccatggcataaaaataagtgatttctgggggtggggcagaaatgttcccaagtctgacaatagagcattttacaaattcctacaaagaaaatataggcaaatagataaaatttatttttatggagaagaaatatggccatattatggatttgtcttttttttactcagcaagatagcaggacttacccttctctattaagtatcacttgaattgctaagaagaaaaaagtctgtaccatcatctttcatggttgcattcaaatgtatattttcaaagagaaatacttcttgtgtccccattccaaaatgtcatgggataaatatgaaatagtttatgaagtagcctttctggttcagagtgactggaccaaagtctgaatcttatctgggtatcaggaaaaagaatttttatggaaatccttagtgtctataaacaacccgtgtaaaccctgtctacactatgccaaaaccagtggaaagatgggtagagtcatcttatctcaggatgtcaaaaatctgggtttgactgattcccctaccttcccacacagtatattcttgtgatttttgcttttctgtagatcctgagtcggtgttacaatagtcatgtttttattttgggttaagaaatacgaggtgtaagagctataatttccttttcgtgttatatcatgatctgggttttcttttttcctttacgtttttcacagctcttgagtattttctatttttttctttagtcacaaaaattaaaattaaactttatttttatgaattaaaatgaaatttaatttatttttatgaattaaaattgtggccagtatccactgtgtccttaggctgagaagtactaatttggagtagcccgtgtgtggaattctaaagtgaaggtactgtggattcatttttagtagttttagccccttaataagtggctaagttagaaaactttcagcgaggtaatagaaccacttgaatagaatccatgtgtctttttctgaattggtgaaaattcggccactgatccagtgactcctggtcaaacgtcttataacattactggccataatgcatccctttatctcatggaaatggctgaactttgtggtagctgctgcgagtacctgggcttaacagtaatagagaacctcatttataccatacagacacagcaacttaggaagacagcactgatagcatttagctagttgtaaccaaatacaaatatgtaaaattgagaattatgattaacatatgcaactttagtaataggaatagatgataattttcctgtattgtttcaaataagtgactgttcagctgggatccattggattataatttacaatgtcacataatattatgcttttcaatattgatgagtgatgtaaacaatataaagttggcagtttgtagtagttcagtatcctagaaatacattgaacttcataagtatcagttcatttttaagcatacagaattgaagattctgactgaaatcataaactcagaggaaacaagcccatctttatcactaattacttagcttgaatacttttctatttttaaataatcctaattattgccttttcaatatagtctactgtatttatttatatgggatcaacaggtatttatcaaacatctactgtgtgcccagcactacctagtactgttggggaacatcaatttgcagttgtggtctctgcccttgaaggtatcttctccaggaaattagcagtattattttcacttctaagcaaacatgagcaaaagaggacctgttcattaaaaaacatgctgacttttttagtttcaactgagatatgccactgtagaagtgaaagtaatttcacaattaaagaaatgcttcaacttggtaattaatatggtcatacagggacttggtgtagcatgcaaggaagcagaagacctgggcttttgtcgaagttctgccatttaggtatcagctgtgtaaccttgaataagtcacttaactctttctcttagttttctcatttgtaaatttggattaaagtgtttattatgataatcaattaagaaaatctcttaacacttcatacatacagagaacttatcattaagttaaaactggcaattaatgcacctttatatatatttttaaatgaaaactaatactattcatgatgtttattttatatcaaatatatgcccagggcatgctactttaaaaatccgaggaatctccaacaaggtgctggattaaaatcagattttgtgcttgaagtggaagaaaaatgaagttgtttatggataagagagtgagaatgtgtatcctcaagtacgttaagatgatttaactgaaagatggctttaggtttttcttgaagaattaggaaagtaccatccccacagattcagcatactcttcaggtactagataaaggtgaaggaagtcatggaattaaaatgacttagcaactccccagggaacttgtggggagaatgaggtggttagaaaggtgagaatgcacaaagacagctctgggttgggtaccaacagtttgcttggtagaaagaaaccagtgtaggaaaggagacgccaccagacatcttcaacagacaagattctttctgcctttttcaaaagatgctctctgcagcagtaagactatagatagagttgattggaatatcatgtgacccagtatgctactgctaggcataattatcaaaaattcatttttctcattaaatattgttaattgctcgccacataaagagaagctagagctcaccagtcttggtggtgtcctagaccttcctctaaagcagtcttgggaagctggatcatcagatctttagcctagacagagtgtcgctggtaaataaaggagacacaggtaacccagagtggacagtgatttgcgtggggagacacagtggatctggggcctctgatactttgcttcctaaaacagcccccagttttcggcttgccctatgagatgatgttcatgtgcttccttgaaaccaggtggaaagaaaggggaagaattaattttctcattctgttgctgttgaacgtaatgtaatcttaatactgtagccttcctagaagcccttccctctttttcatgctgtaaagtcaaatatttgatatccttaacataaattttaaaaattaaggtcattaggaagcaaatgtctatttccaaagcaatgagcttgttgtgactgtgattttattcttctatagtatttttttcctcattttaattgagaggagaaaataatactcttttgcaatatccttaggttctccccttccccctggtgccccttctagtgtcttaagactttgtcttaacaagtataacattacattttgttgttaaaacctttcgaaactgtattcagtgattcttccaagtttatctgctctgcactatttcactaataaaccctggctaccacgtagcccttgatctccaagtagtttacctatgcaagacctgtgacactctgaattcacttctctttctttcagaaagtagtcataaatggagcttaattataaaggtaaaacttgtctccaaccagtttcattttggccatttctttttcaaaatgtcagctgttttcctccaagatttttcaccaaaacaatgatcataagtgctggaatatataatactttgcaggcataaaataacccagacatactctcatatttctttggtgtattttggttggtaaaacttaccagcattaaatgtaaaatataatgaggagttaattccttacctagaactatttcttccttttaagattcataagtaaccttttatttttacagagctacgtataacttccacattacagtcagggacctgaggtgtaacttactaagtgaaccccaaggttattttatcttgcaaaagaaacctaaaccaaactaagggccttacagtttatggttagactgaatcaaaagctataacctcaatttttccaaaaacagcttctgactgcaaaagcaagtcatacagttgttaggtatgaaatagcactgatcaggaaatgcatcttcgcagatggtatttccttcagaaaagacttttctacttttaatataaattaagccataacagtttcatgctgtggaaagagggtgaaaaggttcattttaagagattatataatatgaactttcacatttactgtgaaatgtctaactttgccagtgcttcagcaagtttttttggggggtgatggggaggggtagtattggttttagaggtttcaaatctgtgaactttggagaggggacagttgttggctctggtatttactagttttgtagtaacgttttgctagcctgactgacttttcttactggtttttatgcccacggtccgaggggactgttcttcttgtttggggtgtctgcggaatagcgtctcgtcttgtttgtataggcagtcaatgtgtgtgacatgtgtgtcctttcagtccggaagcccactgtgtgacaatggcgtggggtgtggctgggaggtggggtgctgaagcttgaagagcatttctttgctgattcataacagtatttcccatcttttgcctgcaggcagggaaagtgtacagtatttattttgtttctgttttactttaaatttgtaagtctttaagtagcttacattgattattataggggaggacaagtgacttgtttaaagttgtatttagtattctttccaatttctgtattttaaaatattgaaattaaaattgtattacttctgttttgatttttttagcactcagtgtattttttgctcattttgtttgaaagtataaatgttgaaaattgtataaaatgcgtccttgaaagaaaaagaatctgaattctatatcc

SEQ ID NO: 2465 - DNA, 4674 bp, Homo sapien
ggttggctcttgcacttcctggctctctggacttggttatgtgattgagcctccatggcctccgtgtctttgtctgtcaatgggtttgattaaagcgttgacctcataggttcttaggaggattaatgagaacattttatgtaaagctgcttacatggagccttggtatgtgccggaaagctttagccctttattaaaagtgacagcagacccagcacggtggctcatgcctgtaatcccagcactttgggaggctgaggcgggcagatcacttggggtcaggagttcgagaccagctactcgggaggcagaggcaggagaatcgcttgaacctggggtgcagaggttgcagtaagctgagctcgcaccactgcactccagcctgagtgacagagtgaaactcagtctcaaaaaaaaaaaaaaaaaaagagtggcagtagtggtgggggagacccccatcccccttgctggggtttcctaggaaagaaggctggtgagagctgttgctggtggtgggccctgagccgcagggtctgagggcctaccctgtgctaccccagagctgcctgagaactggacagacacgcgggagacgctgctggaggggatgctgttcagcctcaagtacctgggcatgacgctagtggagcagcccaagggtgaggagctgtcggccgccgccatcaagaggatcgtggctacagctaaggccagtgggaagaagctgcagaaggtgactctgaaggtgtcgccacggggaattatcctgacagacaacctcaccaaccagctcattgagaacgtgtccatatacaggatctcctattgcacagcagacaagatgcacgacaaggtgtttgcatacatcgcccagagccagcacaaccagagcctcgagtgccacgccttcctctgcaccaagcggaagatggcacaggctgttaccctcaccgtagcccaggccttcaaagtcgcctttgagttttggcaggtgtccaaggaagagaaagagaagagggacaaagccagccaagagggaggggacgtcctgggggcccgccaagactgcaccccccccttgaagagcttggtcgccactgggaacctgctggacttagaggagacggctaaggccccgctgtccacggtcagcgccaacaccaccaacatggacgaggtgccgcggccacaagccttgagtggcagcagtgttgtctgggtgagtggttgtgtggccagcagatcggtgatcctcagcctgacctctgggtgagcctggggctgctccagggaccaggctctgggacccgtgacttgtgggcctctgggaggaccagacccagcccggtagtgcccaggcgcaggataggggatgaacaatgtcccttttgaacctgaggctgcatccccaacaggcttggctcccagcacagctgtctcctcacaatgcttggcctcttggcctgagcgtccacggctctgcccaccacaagaccagccaaaggcgcccttgttcttggtgtggcagagctcgctcctaccacccctccccctcagccgcctgaatgaggacccagagacttgggcagtcaccagcttggtccctgactccctcagggactcagggcaagccccctgacctctctgtctcagctttttcatctcagtaagggtgatgacctctgccaacggaatctccccgaggaacctgaaatttaattttaatttttcatttggaaataatttcagactgtgttacaaaattagtacagagaattcctgttcacccgtcatccagattccccaattgttaacatcttgcatgaccacattacactggtcagaatcaggaaacaaacacgatactgtgctgttatataatctatagaacttacacatttctccaggtgccccttcagtgtcctgtttctggcccaggatccattgcagaatcacatgttaacttgtcgtctctttaatttttaaaaatctgggtactgggggctcccctggtgtccctcgagcctgttctctgctgtttgggaaccacccttgccacttgcccatcctcaccagaacgccatggagggacctcacctgtcgcttttctgctgaggctgtgggactcctggcatcagttatccctcatgaacttggaattttggcttggcttttggaagtaaatgaaggcaagaaaactcccttccccaccctcttccttttggaatttgaaagccatagaagtcatcaggtccaatgccctcctcttattgaaggaaaagctgagtttcaacgtggagcagtgacttgcccaaggtctcacgggcaggtagcatggaccagggcactgaacccacctgggtctccagacaccctgggacatggcctttctcctctcccacgtctccagctttgggtccttgggctgagatgctggcgatgcacccaggcaggaggcctgcctgaggccgtgcctccaggcgcccaccctgagcttgtgtcctgagtccctgtagcttacccagggctgggacaagccccagctgtgagcatgggctcccccaaacatagttcttatctcctgctttgtttttcccaaggagctggatgatggcctggatgaagcgttttcgaggcttgcccagtctcggacaaaccctcaggtcctggacactggcctgacagcccaggacatgcattacgcccagtgcctctcgcctgtcgactgggacaagcctgacagcagcggcacagagcaggatgacctcttcagcttctgagggcccggggccagccggacacaagcggccctgacacgtgatggaccaaagccacctgctgcgggggagccagttctggggcccgcctgccacctctcccagccctcagcattgtcagcctgaagatcagagctgcagccagtcaggcaggggagagatttttcttttaagccctgctctttctctgagaaccaaaagatgccttgaatatttattcagtgacttctggcttatgctcagaagccagtctgcgtcaggcacgtctcctgctgcgtgacatgtgcagtgctgtaatcggctcccgcttgctctcctggagcaagctctgccctggctgtgggtatcaggactgtgaccaaagcatttctagtcccttctctctttctaaggacccaaatttccctgggggcatcctgcttcctgaaagctgttggatttcagtgatttttccccccaccccccagcacaggagagcacccacagccgcagaaggggaatgtgtcctcctgctctgcttcctcagggcccagcaggcgggggtttgagccctggaccccaggctcttagagactaaggggcagctcctgaccaaagacgatacagcttggcactttaaagcattaacagcaggtgtgaccctgagggctcctccatggtgctgcattgagtccagctttccttctgcccttcctccaggagaaggggcccaaggtccccgtggatggtctccacctgtgcttggaaccagtgtaactggctgctccctgctcccagggactgacacggggatcatctctgtgaccgccctccgtcgggcccctgcctgccttctcccctccacgcaaggctgtgctcttcctctggtttctgtgtgtccgtttgagtgtctgcgccccgcctccccatacttcctgggatgatgtgtgaaacctgacacctagatttatttggaaatattctatgaccactttacagatgaggaaactgaggcctcaagcgtggaggggtagagtgaagagtagaacccaggtctgatgccaaagctgctttcttctctgcctcctcctcacgcaactcacacctccttttcttctagctttgttgtcctcccaggaaccaaaaaaccccagctattttctgaccaaaatgtgtttcataacaaaccatctggtgcctttccacacagaactggcaggagcctcgtgtcctgctagctgtctctcttgttgatttccgtgaaaatgcaagtgtttgaagtctgctcattccgagggtgaaacaaaatccaaccctgtcagaatcatgctgttctctttgctgacactgtgaccctgggtcgggacagaccagcagcaatctgtctttagaatcgctttccttcctccccttttgcccccgtggggctcccggcatcctgaaagccagcaaagcctccagcatcttttccatcctgaggtgcctcccagtggcctggcttgtcggagcaagtttcatcagccctagggaaaacacggccctcctgggaacctccttacctggagtaaccggacaccttagacggaggtgcctgagggtggggtgggatttgcagggtcattatcagaacatgaggataacttccttgcccctgctctgtagccacctccttggcaccggcctctatttgtcataaggcggcgtgggcgaggcctgacacaggccagccttggcacgaggggggccaggggttctgagaagcgctgccctgtgagagccacgctggccttcgtctccatctctggttgacgggctgtccgtttgcctcctgtgtgtctgcagacaagtcttgctgtgctttatttgtgaaactttaatgaggaaaaaacaaataataaatgttctcgttttgaaactc

SEQ ID NO: 2466 - protein, 221 aa, Homo sapien
MLFSLKYLGMTLVEQPKGEELSAAAIKRIVATAKASGKKLQKVTLKVSPRGIILTDNLTNQLIENVSIYRISYCTADKMHDKVFAYIAQSQHNQSLECHAFLCTKRKMAQAVTLTVAQAFKVAFEFWQVSKEEKEKRDKASQEGGDVLGARQDCTPPLKSLVATGNLLDLEETAKAPLSTVSANTTNMDEVPRPQALSGSSVVWVSGCVASRSVILSLTSG

SEQ ID NO: 2467 - DNA, 1020 bp, Homo sapien
tgtggcatttagaggccaagcaattgacagaaagggtttcttctacctctgttatctaagcagagggaagtaaacttctcaccgccccccacccctcactgcccccgattacactagaattgctttcgccaaattgtagttgaagctaaggaaggggaatctggcccctgctgggagagggaactggaatgccacacaaggcaaggcctgcttccttccttcccctctgctgctgctgcctcggaacgctgcagcccaggcttcctcccacagtggcccttggaagcaggccgcagagtagacagctgctccttttggaagagtcagtcccctgtgttttctgaactgtttttcctagcatgtatgtgggtagagctttcatgcatctctagtaataataagctgaaattagttttttttttaattctccaatttaaaacttttaattaaaaagtaaattttaatgtcgaaaatgcaaacttggggagggcagaaagatcacacacaaggctgtcacttcatacttgcaggattgcacagcagccgggcagaggcgctcctcacttcccagatggggcggcgggcagcagagacgcacctcacttcctagacagtgcggcagccaggcacaggcacacctcacttcccagacagttgggcggccaggcaagcgctcctcacttcccagatggggcggctcgcgggaagcggggctcctcacttcccagacagggtggccaggcagaggtgctcctcacttcccagaacaattctttatgaatttgataaaggactgaagtgcaactgaaagctgctagtgatgatctggtaatatacaatttgtccagtagccagtttgtttttattgtgttttctaaccataagagatcattaaaggcaaagcctgtatgacgctgtacacacacaaaaaaatggtcaccgcaggccatactaccaatgaaatggtaggtaaacaaatcttctggccaaaaaaaaaaaaaaaaaaaaaaaaaaaaaaaa

SEQ ID NO: 2468 - protein, 48 aa, Homo sapien [sequence omitted]

SEQ ID NO: 2469 - DNA, 1323 bp, Homo sapien
cacaaaggcaccaaaccacaaaacgtcacacgtaaacatcatacgtggcaaccacaagccaatcagttggatatttcattcattggtatacatatggactgtaaggtgtctttcaggttgcagaaaagatggaaaaaaggacatgtgcactctgccccaaagatgtcgaatataatgtcctgtactttgcacaatcagagaatatagctgctcatgagaattgtttgctgtattcttcaggacttgtggaatgtgaggatcaggatccacttaatcctgatagaagttttgatgtggaatcagtaaagaaagaaatccagagaggaaggaagttgaaatgcaaattttgtcataaaagaggagccaccgtgggatgtgatttaaaaaactgtaacaagaattaccactttttctgtgccaagaaggacgacgcagttccacagtctgatggagttcgaggaatttataaactgctttgccagcaacatgctcaattcccgatcatcgctcaaagtgctaaattttcaggagtgaaaagaaaaagaggaaggaagaaacccctctcaggcaatcatgtacagccacccgaaacaatgaaatgtaatacattcataagacaagtgaaagaagagcatggcagacacacagatgcaactgtgaaagttccttttcttaagaaatgcaagggaagcaggacttcttaattacttacttgaagaaatattagacaaagttcattcaattccagaaaaactcatggatgagacttacttcagaatcagactatgaagaaatcgggagtgcactttttgactgtagattgttcgaagacacatttgtaaattttcaagcagcaatagagaaaaaaattcatgcatctcaacaaaggtggcagcagttgaaggaagagattgagctacttcaggacttaaaacaaaccttgtgctcttttcaagaaaatagagatcttatgtcaagttctacatcaatatcatccctgtcttattagggattaccatttcctaagccaagagtcatgtcaaattgcaatcaggctcaaaaccagagaccaggctgtgaaatccacacatctttagaactagtcgtctcctcttggcctcagcagctcttccctgttcttactggttgacattttgatcactctttgcacactcttgtgttttttgctcactgtcacactcccagcacctagtatgctcagtaaatgtttgtggaataagtgcataaaatgttcttaacctttgattctacttacagcccatgatagcctcttagatataataaatttggattatactaaaa

SEQ ID NO: 2470 - protein, 191 aa, Homo sapien
MEKRTCALCPKDVEYNVLYFAQSENIAAHENCLLYSSGLVECEDQDPLNPDRSFDVESVKKEIQRGRKLKCKFCHKRGATVGCDLKNCNKNYHFFCAKKDDAVPQSDGVRGIYKLLCQQHAQFPIIAQSAKFSGVKRKRGRKKPLSGNHVQPPETMKCNTFIRQVKEEHGRHTDATVKVPFLKKCKGSRTS

SEQ ID NO: 2471 - DNA, 5372 bp, Homo sapien
acggccagtgcaagctaaaattaaccctcactaaagggaataagcttgcgtccgcggagggacgatgcgcgagtacaaagtggtggtgctgggctcgggcggggtaggcaaatccgccctgaccgtgcagttcgtgaccggcaccttcatcgagaaatacgaccccaccatcgaggacttctaccgcaaggagatcgaggtggattcgtcgccgtcggtgctggagatcctggacacggcgggcaccgagcagttcgcgtccatgcgggacctgtacatcaagaacggccagggcttcatcctcgtctacagcctcgtcaaccagcagagcttccaggacatcaagcccatgcgggaccagatcatccgcgtgaagcggtatgagaaagtgccagtcatcttggttgggaacaaagtggacctggaaagtgagagagaagtatcgtccagcgaaggcagagcccttgctgaagagtggggctgcccctttatggaaacttccgctaagagtaaaacaatggtggacgaactctttgcagaaattgtgaggcagatgaactatgctgctcagcctgacaaagatgacccatgctgttctgcatgtaacatacaatagcatccaaatatggctgtcctggatgggatttgcccaatgtcgtaggtgatagaaaactcgcctactccactgcagaacttgcagaatgcgtggtgttaatctacagagaactgcagcccttattcagaattgagcagtgattgtcagttgatatctctgagtaacatttgggttcagtaactacagttttcaccatttgtcctcagtctcctttatgcatctgcaactttaaggcatagtccatcgatctacagggtgatctcatttgaaagctatgatggcattgtcgctgagttgacagaagcaactattgtacaaattaaaaataaccataagggagaaaccagaagaattcctctgaccacttacaattaaaatattttgtcttctttaaaaaaataagtaaaggagaaatattttcctacaagagtactgaatttcaggaaatgggatagagcttctaaccaatgtattccgtcaagtaagataataacagctgacctgccaacagcattacagggagattctttgctcagctaacacatttctgtttttcaaaattgatgcttaattgtagctgttattctaatttgtgacatggaactaactcatgcttcaatccttgatagagcaaaactcagaacaggttatgtaaaaatatagtctggctttagaatttgttaattcacctgctttgccacagaaaatggaggctttcacaagggtttgatcagaattaaaaccccaaacccgccctctgttaggggtggtctttataactttactgaacaagagggaagcaactgtgatgggaagagattacctagccttactaacaagaagcattctaatagataaactagtaccatcatgtaaggaagatgaagccatgttgcatccacatgttcccgtttgcagaaacctcacaggacagtacgaatatctggcatttttaagttcattaaagcagcaaattccttctcgcctttaagggctatggttgtagtgtgacccgtggctaacctgctttcaaaatcaagtatttgctgtagcagagctttattgcaggcattttaaaaattgaataaccatgtgaaataatttgggcttaaaagtgaacataaattatagagtggaaggtaagggacaaaagccttttacctttaattttcctggagaattatataaaggttttcttagaacaattttgccctgattactgaagcgtcaaataaagctggagtgaaaattttgttttgaaaaggtgctcaagctctgacatttttggttttcatagtcgtgaagtatttatcatttgcatgactaatggcacaggaaaaacctattcataagttttacaatcaagtatagaggggtcttcagctaacttagttatacataaatgctgaaaagattatcttgagctgggccttgggagaagaatttggccttcagaactgcaatatcactgagcctgcgatctatacaccaccccacattttgttggtttcacagtcttgtgcaagtaacctctggtcttacgtgtgtaactgagagaagagtgtgtgtttgtgtgtgcatgtgtgtttattgttcctaagaatttggcacaagtcagagataattgcctatactaagaatctatactgcagaatatagtgtatcaaaaacttttttcttttaaattattaaagtgtcttttatacttttatgaaatcattggtagccccccaagtgtttaataactggcattaagcttagagggtgaaaaaaaaaaaaagattgatagtatttttcataatgaaaaaactgaagagatacgtgaatgaaaccaggccatagctgtcataaatctttgacttttgaatatttacattcttcagtataattttttataatcctcaattatgaaccaccttgtttataggacaaaaaaatttaaccaattttattgaaacgaatttcactgtgtaaaagttggtttgattcaaacatgtagagaagttgtagattcaagatatatgatttctctatggaaataaaaatatttgttagtgaattggttgagttttgattcctctaacttctcagaatgattctttagaattctataattcatagcaatttttgacaagtaagattgcaaaatagaaatatctataaagattccacagtttgacattatggcttgctatgcagatgtgaaaataggttaaataatatgaaagatatggcagaatgtaaagtggaaaagatgacctaaaattttgagttgtattaatagttaaaaacatttgtgtcagatgacagggtgggcttttactgtcaagacatgaataagaactgatctggctgcctgatgagtgtttccacgcagccctgcatatttagtgaccaaggcatcaaggacatcccgaaactggaaattcatatccatctggtatgaatatataactcagctggcaaatgaatgtgtttgttgagatattacagtaataaaacacttaagaacaggaagattacatttgttggcatacgaaaccttagtggctacagaagaaagttgaccttgtgtcactatttattttatgccctgatcagactagcaacttagataagtgaaagtttttctaacatgccttaaaaatattatggtttgatccaaagacccactttttctttagctcttgtgataagattttcttttttttacttttatacaaaggcagcatctttgaatttttttttcttttgatgttgcaacttttgggttcttttaaactgtgatagtgatggtaactgatgcctttcattttgttcaacttatacaaaacaagccagcatctgatcaaaagtattacataaaatattttcttaaactattgaaaggtgctttgatgattttctcctttggtttgtagaattaggactgaacttttgactcaaattgctacagttgccatcacctttctgtggtaatactactgatatttgcttttctatataaagaaatgttgcctaaggctgtctggtatttcttttcaagggttttccagtatgaatgttaatgttgtcagtgtatgtatgaatatgaaagtgctttgttttgtttgttgctgttttttgtttatgtgtgtgtttttaatttttttgttcttatcagcagtcttgtgttagcactgggtaagctttaattgtcccttagccaatcaaacattaaggactatggaggtctttttttttttatttaacatgtcattgttcatctattaaatcttgatcagggtttcaagaatgactgcagtgggttttggaaacagacttatcattattgatttgaggtttcccagagatatagttcacagttaattgttgcgctctaatacaactgaccatttaaaattgaacaagtttattgttttgtaacaatgtcagttgttaaaccttgacatttcaattaaaacatgaattgtagttataactcaatgcaaattcaacagttgtatttggagttaaattattttaacaaataaatttaactccaaatacaactgttgaatttgcattgagttataactacaattcatgttttaattgaaatgtcaaggtttaacaactgacattgttacaaaacaataaacttgttcaattttaaatggtcagttgtattagagcgcaacaattaactgtgaactatatctctgggaaacctcaaatcaataatgataagtctgtttccaaaacccactgcagtcattcttgaaaccctgatcaagatttaatagatgaacaatgacatgttaaataaaaaaaaaaaagacctccatagtccttaatgtttgattggctaagggacaattaaagcttacccagtgctaacacaagactgctgataagaacaaaaaaattaaaaacacacacataaacaaaaaacagcaacaaacaaaacaaagcactttcatattcatacatacactgacaacattaacattcatactggaaaacccttgaaaagaaataccagacagccttaggcaacatttctttatatagaaaagcaaatatcagtagtattaccacagaaaggtgatggcaactgtagcaatttgagtcaaaagttcagtcctaattctacaaccaaggagaaaatcatcaagcacctttcaatagtttaagaaaatattttatgtaatacttttgatcagatgctggcttgttttgtgtaagttgaacaaatgaaaggcatcagttaccatcactatcacagtttaaaagaacccaaagttgcaacatcaaaagaaaaaaaaattcaaagatgctgcctttgtataaaagtaaaaaaaagaaaatcttatcacaagagctaaagaaaaagtgggtctttggatcaaaccataatatttttaaggcatgttagaaaaactttcacttatctaagttgctagtctgatcagggcataaaataaatagtgacacaaggtcaactttcttctgtagccactaaggtttcgtatgccaacaaatgtaatcttcctgttcttaagtgttttattactgtaatatctcaacaaacacattcatttgccagctgagttatatattcataccagatggatatgaatttccagtttcgggatgtccttgatgccttggtctctaaatatgcagggctgcgtggaaacactcatcaggcagccagagcagttcttattcatgtcttgacagtagaagatcactctgtcatcactcaacgtat

SEQ ID NO: 2472 - protein, 183 aa, Homo sapien; identical to SEQ ID NO: 1889

SEQ ID NO: 2473 - DNA, 2639 bp, Homo sapien
tcgaggcgaccgcgacagtggtgggggacgctgctgagtggaagagagcgcagcccggccaccggacctacttactcgccttgctgattgtctatttttgcgtttacaacttttctaagaacttttgtatacaaaggaactttttaaaaaagacgcttccaagttatatttaatccaaagaagaaggatctcggccaatttggggttttgggttttggcttcgtttcttctcttcgttgactttggggttcaggtgccccagctgcttcgggctgccgaggaccttctgggcccccacattaatgaggcagccacctggcgagtctgacatggctgtcagcgacgcgctgctcccatctttctccacgttcgcgtctggcccggcgggaagggagaagacactgcgtcaagcaggtgccccgaataaccgctggcgggaggagctctcccacatgaagcgacttcccccagtgcttcccggccgcccctatgacctggcggcggcgaccgtggccacagacctggagagcggcggagccggtgcggcttgcggcggtagcaacctggcgcccctacctcggagagagaccgaggagttcaacgatctcctggacctggactttattctctccaattcgctgacccatcctccggagtcagtggccgccaccgtgtcctcgtcagcgtcagcctcctcttcgtcgtcgccgtcgagcagcggccctgccagcgcgccctccacctgcagcttcacctatccgatccgggccgggaacgacccgggcgtggcgccgggcggcacgggcggaggcctcctctatggcagggagtccgctccccctccgacggctcccttcaacctggcggacatcaacgacgtgagcccctcgggcggcttcgtggccgagctcctgcggccagaattggacccggtgtacattccgccgcagcagccgcagccgccaggtggcgggctgatgggcaagttcgtgctgaaggcgtcgctgagcgcccctggcagcgagtacggcagcccgtcggtcatcagcgtcagcaaaggcagccctgacggcagccacccggtggtggtggcgccctacaacggcgggccgccgcgcacgtgccccaagatcaagcaggaggcggtctcttcgtgcacccacttgggcgctggaccccctctcagcaatggccaccggccggctgcacacgacttccccctggggcggcagctccccagcaggactaccccgaccctgggtcttgaggaagtgctgagcagcagggactgtcaccctgccctgccgcttcctcccggcttccatccccacccggggcccaattacccatccttcctgcccgatcagatgcagccgcaagtcccgccgctccattaccaagagctcatgccacccggttcctgcatgccagaggagcccaagccaaagaggggaagacgatcgtggccccggaaaaggaccgccacccacacttgtgattacgcgggctgcggcaaaacctacacaaagagttcccatctcaaggcacacctgcgaacccacacaggtgagaaaccttaccactgtgactgggacggctgtggatggaaattcgcccgctcagatgaactgaccaggcactaccgtaaacacacggggcaccgcccgttccagtgccaaaaatgcgaccgagcattttccaggtcggaccacctcgccttacacatgaagaggcatttttaaatcccagacagtggatatgacccacactgccagaagagaattcagtattttttacttttcacactgtcttcccgatgagggaaggagcccagccagaaagcactacaatcatggtcaagttcccaactgagtcatcttgtgagtggataatcaggaaaaatgaggaatccaaaagacaaaaatcaaagaacagatggggtctgtgactggatcttctatcattccaattctaaatccgacttgaatattcctggacttacaaaatgccaagggggtgactggaagttgtggatatcagggtataaattatatccgtgagttgggggagggaagaccagaattcccttgaattgtgtattgatgcaatataagcataaaagatcaccttgtattctctttaccttctaaaagccattattatgatgttagaagaagaggaagaaattcaggtacagaaaacatgtttaaatagcctaaatgatggtgcttggtgagtcttggttctaaaggtaccaaacaaggaagccaaagttttcaaactgctgcatactttgacaaggaaaatctatatttgtcttccgatcaacatttatgacctaagtcaggtaatatacctggtttacttctttagcatttttatgcagacagtctgttatgcactgtggtttcagatgtgcaataatttgtacaatggtttattcccaagtatgccttaagcagaacaaatgtgtttttctatatagttccttgccttaataaatatgtaatataaatttaagcaaacgtctattttgtatatttgtaaactacaaagtaaaatgaacattttgtggagtttgtattttgcatactcaaggtgagaattaagttttaaataaacctataatattttatctg

SEQ ID NO: 2474 - protein, 470 aa, Homo sapien
MAVSDALLPSFSTFASGPAGREKTLRQAGAPNNRWREELSHMKRLPPVLPGRPYDLAAATVATDLESGGAGAACGGSNLAPLPRRETEEFNDLLDLDFILSNSLTHPPESVAATVSSSASASSSSSPSSSGPASAPSTCSFTYPIRAGNDPGVAPGGTGGGLLYGRESAPPPTAPFNLADINDVSPSGGFVAELLRPELDPVYIPPQQPQPPGGGLMGKFVLKASLSAPGSEYGSPSVISVSKGSPDGSHPVVVAPYNGGPPRTCPKIKQEAVSSCTHLGAGPPLSNGHRPAAHDFPLGRQLPSRTTPTLGLEEVLSSRDCHPALPLPPGFHPHPGPNYPSFLPDQMQPQVPPLHYQELMPPGSCMPEEPKPKRGRRSWPRKRTATHTCDYAGCGKTYTKSSHLKAHLRTHTGEKPYHCDWDGCGWKFARSDELTRHYRKHTGHRPFQCQKCDRAFSRSDHLALHMKRHF

SEQ ID NO: 2475 - DNA, 1592 bp, Homo sapien
gaattccattgtgttggggccctgggggcggaggggaggggcccaccacggccttatttccgcgagcgccggcactgcccgctccgagcccgtgtctgtcgggtgccgagccaactttcctgcgtccatgcagccccgccggcaacggctgcccgctccctggtccgggcccaggggcccgcgccccaccgccccgctgctcgcgctgctgctgttgctcgccccggtggcggcgcccgcggggtccggggaccccgacgaccctgggcagcctcaggatgctggggtcccgcgcaggctcctgcagcaggcggcgcgcgcggcgcttcacttcttcaacttccggtccggctcgcccagcgcgctgcgagtgctggccgaggtgcaggagggccgcgcgtggattaatccaaaagagggatgtaaagttcacgtggtcttcagcacagagcgctacaacccagagtctttacttcaggaaggtgagggacgtttggggaaatgttctgctcgagtgtttttcaagaatcagaaacccagaccaactatcaatgtaacttgtacacggctcatcgagaaaaagaaaagacaacaagaggattacctgctttacaagcaaatgaagcaactgaaaaaccccttggaaatagtcagcatacctgataatcatggacatattgatccctctctgagactcatctgggatttggctttccttggaagctcttacgtgatgtgggaaatgacaacacaggtgtcacactactacttggcacagctcactagtgtgaggcagtggaaaactaatgatgatacaattgattttgattatactgttctacttcatgaattatcaacacaggaaataattccctgtcgcattcacttggtctggtaccctggcaaacctcttaaagtgaagtaccactgtcaagagctacagacaccagaagaagcctccggaactgaagaaggatcagctgtagtaccaacagagcttagtaatttctaaaaagaaaaaatgatctttttccgacttctaaacaagtgactatactagcataaatcattcttctagtaaaacagctaaggtatagacattctaataatttgggaaaacctatgattacaagtaaaaactcagaaatgcaaagatgttggttttttgtttctcagtctgctttagcttttaactctggaagcgcatgcacactgaactctgctcagtgctaaacagtcaccagcaggttcctcagggtttcagccctaaaatgtaaaacctggataatcagtgtatgttgcaccagaatcagcattttttttttaactgcaaaaaatgatggtctcatctctgaatttatatttctcattcttttgaacatactatagctaatatattttatgttgctaaattgcttctatctagcatgttaaacaaagataatatactttcgatgaaagtaaattataggaaaaaaattaactgttttaaaaagaacttgattatgttttatgatttcaggcaagtattcatttttaacttgctacctacttttaaataaatgtttacatttctaaaaaaaaaaaaaaaa

SEQ ID NO: 2476 - protein, 294 aa, Homo sapien
MQPRRQRLPAPWSGPRGPRPTAPLLALLLLLAPVAAPAGSGDPDDPGQPQDAGVPRRLLQQAARAALHFFNFRSGSPSALRVLAEVQEGRAWINPKEGCKVHVVFSTERYNPESLLQEGEGRLGKCSARVFFKNQKPRPTINVTCTRLIEKKKRQQEDYLLYKQMKQLKNPLEIVSIPDNHGHIDPSLRLIWDLAFLGSSYVMWEMTTQVSHYYLAQLTSVRQWKTNDDTIDFDYTVLLHELSTQEIIPCRIHLVWYPGKPLKVKYHCQELQTPEEASGTEEGSAVVPTELSNF

SEQ ID NO: 2477 - DNA, 1543 bp, Homo sapien
aaaaaaaaggaagaggtaaaaggcaaggcagcatttaataagtacctgttgtatccttttaagtgtttgttgtggtaatcctcacaaagaccgggactgatggaaactccttgctattaaactttttttcttgaggaattttgcttttcaagtgcatatacactattaatattttttacccaagagagcattctaagctaatttatgcagtgtgactgtattaagcattaagcttccttcagagctggcctatcggagatgctactgccctctctacagatgtgtctgaaatgcctgcccaaggatggcccttagccagttaacagctttatagcccatcctcattgcttactgccacccctcagctggggtccaaggcagtactattcagtttattcaccagacctgcctccagacatctacttctttcaaaaattagtgttttccatcaaggagcatgttccagagcatttcccagagatgtcccaaagaacactgtccggtgctgtggcgtacagtggcaacagcattagactaagtggaacatcccagcaggctgctttagaatccgctcatttgactagatacaatgtaattggctgtctttaaaaaacgcgcacacacacacaatctgataggcatatctcatgcccattcaatatggaatgttcttcgcttgctgaatttaagcctgtattttaaggttttgtggttcctcggccacaatgggtgatgtcactgatagaacgaagctgagtttccaagggtttggggctgtgcaagagtaaacactagagcttgagttgttatccagctggcaagcacggaagtctttgaagaatgtaatgtaaaaagggaaaagaatgtaaagctttttgtaccaaatgagagttggagcccagccaacaaatgcttttccctgtgtaaaagtctctctggaagggacattccatctccatggtgcactctgaggggcactgtcaactagagattggccccatccaggtgggaggaacccctttgggatggtgagtatccaatctgctgtgcatttgacaggatctctgaatggctaggtaatggatcccaagcaggctcacaaatttaaatgagggctttgtgtgcagaaagaggaataagtacagattattttcctaccactagatttttggggagagtcaccatggaatgttgacaattacttaaaatattttaagctcccttgctgaattcctgtcctgtccctgaggaatcagatggtcatacagccataggcacccacccgaaatttccctaggagttggagtaatgctagaattgaagaccttctgagtaaagggcttctctgccttctcagaggcaggagaatttgcactggttgtgttaaatgtataaaaagctatatgttcaccagtttactcatttccaatgtgtagatgaataaaatgtagtgtacaaattatttgaaaatcccagaaggaaggtacttttcaaatacagtattttttttaacaaataaacttacgatttttacagcaaaaaa

SEQ ID NO: 2478 - protein, 25 aa, Homo sapien
KKKEEVKGKAAFNKYLLYPFKCLLW

SEQ ID NO: 2479 - DNA, 817 bp, Homo sapien
aaattgcagaagttacttattcttttaagaggtctgcctggttctgggaaaacaacattgtctcgaattctgcttggtcagaatcgtgatggcattgtgttcagcactgatgactattttcaccatcaagatgggtacaggtataatgttaatcaacttggtgatgcccatgactggaaccagaacagaggtttgttttgggctaagtgtcccaggatagaatatttggctaggagtcaaaagacctagattttattttcagcttaggtttttaccagctgaatgactgtaggcaagccgtttaaatagctttgagacctaatttctccatctgttagaggtggtgataattatacttgccctacctgatcagggtttttgtgaaaagcagagaatttagataaaacgctttgtaaactgtaaatagtttatcagtataagctggtaaaataatagcagcatgggatattttaagaggctttattttatacttgatgagtaaattcagagaactttgaatctgtaccattgttatgtagtcccaaagttatttccccgagaataatgctaatgttttccaaggcttaatatactggttgtgaatattaaaagtttttctcattgatattgctctacaagaaacctacttaatacattttttagcggacatgggtcaatttctgtttatcattaataggggttcttaacctgggctacacttttgaatttcttggggactttaaaaaaaagcaaaaaaatctatgtcgggtgcggagaaagaggtaatgaaatggcagaattcgatagcaagcttatc

SEQ ID NO: 2480 - protein, 82 aa, Homo sapien
KLQKLLILLRGLPGSGKTTLSRILLGQNRDGIVFSTDDYFHHQDGYRYNVNQLGDAHDWNQNRGLFWAKCPRIEYLARSQKT

SEQ ID NO: 2481 - DNA, 1429 bp, Homo sapien
ccccctcccctcctgcagcctcctgcgccccgccgagctggcggatggagctgcgcagcgggagcgtgggcagccaggcggtggcgcggaggatggatggggacagccgagatggcggcggcggcaaggacgccaccgggtcggaggactacgagaacctgccgactagcgcctccgtgtccacccacatgacagcaggagcgatggccgggatcctggagcactcggtcatgtacccggtggactcggtgaagacacgaatgcagagtttgagtccagatcccaaagcccagtacacaagtatctacggagccctcaagaaaatcatgcggaccgaaggcttctggaggcccttgcgaggcgtcaacgtcatgatcatgggtgcagggccggcccatgccatgtattttgcctgctatgaaaacatgaaaaggactttaaatgacgttttccaccaccaaggaaacagccacctagccaacgggatagctgggagtatggccaccctgctccacgatgcggtaatgaatccagcagaagtggtgaagcagcgcttgcagatgtacaactcgcagcaccggtcagcaatcagctgcatccggacggtgtggaggaccgaggggttgggggccttctaccggagctacaccacgcagctgaccatgaacatccccttccagtccatccacttcatcacctatgagttcctgcaggagcaggtcaacccccaccggacctacaacccgcagtcccacatcatctcaggcgggctggccggggccctcgccgcggccgccacgacccccctggacgtctgtaagacccttctgaacactcaggagaacgtggccctctcgctggccaacatcagcggccggctgtcgggtatggccaatgccttccggacggtgtaccagctcaacggcctgccggctacttcaaaggcatccaggcgcgtgtcatctaccagatgccctccaccgccatttcttggtctgtctatgagttcttcaagtactttctcaccaagcgccagctggaaaatcgagctccatactaaaggaagggatcatagaatcttttcttaaagtcattctctgcctgcatccagccccttgccctctcctcacacgtagatcatttttttttttgcagggtgctgcctatgggccctctgctccccaatgccttagagagaggaggggacggcacggccgctcaccggaaggctgtgtgcggggacatccgaggtggtggtggacaggaaggacttgggaaggggagcgagaaattgctttttctcttcctccctgggcagaatgtagcttttctgcttcactgtggcagcctcctccctggatccttagatcccagaggagggaagaaaatttgcagtgactgaaaacagtaaaaaaaaaaaaaaaaaaaa

SEQ ID NO: 2482 - protein, 347 aa, Homo sapien
MELRSGSVGSQAVARRMDGDSRDGGGGKDATGSEDYENLPTSASVSTHMTAGAMAGILEHSVMYPVDSVKTRMQSLSPDPKAQYTSIYGALKKIMRTEGFWRPLRGVNVMIMGAGPAHAMYFACYENMKRTLNDVFHHQGNSHLANGIAGSMATLLHDAVMNPAEVVKQRLQMYNSQHRSAISCIRTVWRTEGLGAFYRSYTTQLTMNIPFQSIHFITYEFLQEQVNPHRTYNPQSHIISGGLAGALAAAATTPLDVCKTLLNTQENVALSLANISGRLSGMANAFRTVYQLNGLPATSKASRRVSSTRCPPPPFLGLSMSSSSTFSPSASWKIELHTKGRDHRIFS

SEQ ID NO: 2483 - DNA, 926 bp, Homo sapien
ctgaattacgaaggcagtccaattaaagtaacactggcaactttgaaaatgtctgtacagccaacggtttcccttgggggctttgaaataacaccaccagtggtcttaaggttgaagtgtggttcagggccagtgcatattagtggacagcacttagtagctgtggaggaagatgcagagtcagaagatgaagaggaggaggatgtgaaactcttaagtatatctggaaagcggtctgcccctggaggtggtagcaaggttccacagaaaaaagtaaaacttgctgctgatgaagatgatgacgatgatgatgaagaggatgatgatgaagatgatgatgatgatgattttgatgatgaggaagctgaagaaaaagcgccagtgaagaaatctatacgagatactccagccaaaaatgcacaaaagtcaaatcagaatggaaaagactcaaaaccatcatcaacaccaagatcaaaaggacaagaatccttcaagaaacaggaaaaaactcctaaaacaccaaaaggacctagttctgtagaagacattaaagcaaaaatgcaagcaagtatagaaaaagcgcattgaacagtcctgggcactacatgtaaattaagcccaaagatggggagaaaggaaaaggagagacaaatatagtccatactgagtgtcatcaacaatccagactgaagtcttctattttaatctcaatccccttttctgatttgccacccatgcctcttcaggctggaaacaatctcttggttccctaaagcactttcttctgactgctgtgattcagtgaaccttgccctttgctttctattacttgtgcatttgcctcacctgacaatgttttaaatcgcctttgtatctccttagctgctcaataaatatttgaatgcatcaaaaaaaaaaaaaaaaaa

SEQ ID NO: 2484 - protein, 179 aa, Homo sapien
MSVQPTVSLGGFEITPPVVLRLKCGSGPVHISGQHLVAVEEDAESEDEEEEDVKLLSISGKRSAPGGGSKVPQKKVKLAADEDDDDDDEEDDDEDDDDDDFDDEEAEEKAPVKKSIRDTPAKNAQKSNQNGKDSKPSSTPRSKGQESFKKQEKTPKTPKGPSSVEDIKAKMQASIEKAH

SEQ ID NO: 2485 - DNA, 2246 bp, Homo sapien
tgtatagatgttaagtgtttcatgtggtttttgtgtcattgctatttatcaatagcaataattttgcactgaaaactttttatagttcaaaaattaagcatggactccccagtatactttaactttctttctttctttttttttttttggagacagagtctcactgtcacccaggctggagtgcagtggcatgatctcagtttatgcaacttctgcctccccaggttcaagcgattcttttgcctcagccacctgactagctgggattgcagcctgcaccaccacacctggctaaatttttgttgttgtcgttgagatacagtttcactctgtcacccaggctggagtgcagtggcatgatctcagctcactgcaacctctgccttctggattcaagtgattcttgtgccttagcctcccaagtagctgggattacaggcgtgcaccaccacgcccagttgatttttgtatttttgatagagacggagtttcaccatgttggccaggctggtctcgaactctgggttcaagaaatcctcccaccttgcctcccaaagtgctgggattacaggtgtgagccaccacgcatggccctgaaccttctctttttaggaataccaaagttttcaactttttcagctttagaatttgtaaatatttttgtagaatatcatatgactgtaattccagagtgttccaacttgtttatgatatatttgggtaaatttacaactgttcttttatttgccataatctggttataacactgtttgtggtaggaaaggaaaacatgcaaaacatacacacacacacacacacacacacacacacgcagagttgtgattctcagtaccaagctataggaccatgttatagatcagcgtttagtcacctccaggttatatgcatcgagaacctgaataaatcatgccactatattaatttatattacatgtttcatatttaaatcatgttttcctaaaatgtagcaactacatgtgataaaagcaaattagaacattctgtaggactgtcttgcataccttctgtctggtttccactgattccttcttagccatggagagcatttgtgattaattaatttatatatgaaataatggtttccattttatgcgagtatttgtaactgcatataccagtgcgtgtgcgtctacctctgtcagcatgaaagtattccagtctttaatttcaaaaacttcaaattagcctcatgaagagaatttttccctgtgaaaagtaagaccaagaaaaaacaaactaaagacatgtgacttattcaatgaaagtgaaaaagaagctctaaaacagtgtcattgattaaaaagaatatctggaatgtagccccactctttgagtgggattcatttcttactgcttatgaactttcaatttagtagtcagaaaccatggatttattttactgcacaatgtgaagtttacattttattaacacttgagtagtctgatttagagactagttacttctattttttaaaataatggagtaacaaattacagaatagctaaataattttttaaaaatattttacagttgtaaaaaatatccatcagaaaaatgacacacaaaacaaaatatctggacctttacagaagacgtttgctgacccccactttaaaggattggaacagtcttctagaattgaggaatatttattaaaatacctgtaaagaaaatagtgaatcactgtagcaatggctttgattcagaccttaaaatcacataagaagaattacaacatgttatggatttttaagtggcaggtattgtaactgttttttgtgtgcaaaatactgagtaaccactgggaaaatatttcagatgaaagggatgacaaaagcatgttgcgctttgcatcagcaaggcattgacttctgaaaaaatgatctgaaaaaagtttcaccgtttgtcttcttacctcattttaagaagcatgtgaaaatgggatactatagactactgagaatttcagaaattgagaacaatttcataataaaacggctatatttgaagagagaatacattttatataaacaggaaaatacatttgacactttatggaattttatgagactttttgtgggaacagaaggtcttcaaattgtaaaatgtaaagattgctctttttattaagtctttaacagggatgtatttcattgtatgttttgggtatggctttggaataaatcattttatattttatttg

SEQ ID NO: 2486 - protein, 135 aa, Homo sapien
MISAHCNLCLLDSSDSCALASQVAGITGVHHHAQLIFVFLIETEFHHVGQAGLELWVQEILPPCLPKCWDYRCEPPRMALNLLFLGIPKFSTFSALEFVNIFVEYHMTVIPECSNLFMIYLGKFTTVLLFAIIWL

SEQ ID NO: 2487 - DNA, 2188 bp, Homo sapien
ctctttcccttcggtgtgccactgaagatcctggtgtcgccatgggccgccgccccgcccgttgttaccggtattgtaagaacaagccgtacccaaagtctcgcttctgccgaggtgtccctgatgccaagattcgcatttttgacctggggcggaaaaaggcaaaagtggatgagtttccgctttgtggccacatggtgtcagatgaatatgagcagctgtcctctgaagccctggaggctgcccgaatttgtgccaataagtacatggtaaaaagttgtggcaaagatggcttccatatccgggtgcggctccaccccttccacgtcatccgcatcaacaagatgttgtcctgtgctggggctgacaggctccaaacaggcatgcgaggtgcctttggaaagccccagggcactgtggccagggttcacattggccaagttatcatgtccatccgcaccaagctgcagaacaaggagcatgtgattgaggccctgcgcagggccaagttcaagtttcctggccgccagaagatccacatctcaaagaagtggggcttcaccaagttcaatgctgatgaatttgaagacatggtggctgaaaagcggctcatcccagatggctgtggggtcaagtacatccccagtcgtggccctctggacaagtggcgggccctgcactcatgagggcttccaatgtgctgcccccctcttaatactcaccaataaattctacttcctgtccacctatgtctttgtatctacattcttgacggggaaggaacttcctctgggaacctttgggtcattgccctttcacttcagaaacaggttgacaactcagccctgctcatgaggcagcaaaccctgcaaagggctgggactggtggccttatgtcagttgtctactctggagcttgacttggacctccccaggtcctaggcagtaggttgaaaaacactgaagtgcttttcatgaagcacagctgcagcaaagccttgcaatcccaggctggggtcagcctacagttgtgttgcttattacaacacatgcggaccaagaggggcttgtgggctagaggctgaccagcagcgtttatttagcaagggtaggtgtgcatcacattgggcttgttctcacccatctggtttggccattcctccttggtgggaatcatccaggtactgctgaggtcacctgcgatttgccccatttcctatctctagcaacctcctgggccccatgcccccaccccttctagaacctgcattcccagggccttcaccacctgaccaaaggtctaggctaacctttggtcatttgtaacaagacctcggaacagacacgtgtgtggcatggtttggcctggggatcttagatgtctgacctgaactattgtagaacagcgctggcttttgggggagcagcaaaaatgagaggagtgctaggtgggtggcctgagcatctgtatccagggacaggactccaaaggcttttggtcccagagctggggtatgttggccccagcccccagcctgtggctcccaaaaggcctctggttttttgtaatctcagtttacagccatttcttaggtttttaattacctttattttattttgccaaacatacctgggaataccttttattttttttttaccttggggtgatggttccaaaccataaatgtgattatagttaacacatgacccttctagcgtcccagccagtgtttttcctgacctctcttctttggagaggaggatggaagggaggggtccggcatgctgctggcattttgctgtgtcctgcagcccctttccgggacacctgggttcacacagctttttagcttacataactggtgcagattttctgtgtggagatgttgccttgaccagccttggctggactttaccaggcatgcagaagcctgtaccaacacagactacagcacccaggaggtgcgagtgtggctgctcagcggttataacaggcctgactgcattgttcaccggattataatgagccaaaatgtttcccggtgtttgctggtttcagggaaggagtttgatatagcagattaaccaccctccttgtagctattggggcttaatggtttcctggtgattcttaccaatccacaataaacatggcccattggcatatctgcaaaaaaaaaaaaaaaaa

SEQ ID NO: 2488 - protein, 214 aa, Homo sapien
MGRRPARCYRYCKNKPYPKSRFCRGVPDAKIRIFDLGRKKAKVDEFPLCGHMVSDEYEQLSSEALEAARICANKYMVKSCGKDGFHIRVRLHPFHVIRINKMLSCAGADRLQTGMRGAFGKPQGTVARVHIGQVIMSIRTKLQNKEHVIEALRRAKFKFPGRQKIHISKKWGFTKFNADEFEDMVAEKRLIPDGCGVKYIPSRGPLDKWRALHS

SEQ ID NO: 2489 - DNA, 1201 bp, Homo sapien
ggcacgagggaaagctgaaagcgtgcgaggggggtggggtggaaatagcggctgcttcttttccaaggatttatttaatggggatgtgttcaaggcaagaccgaattcagaaggatatcgacgtcgtgatccagaagtccagagctgaggactgcctgtttgcagggcccgcctggcaggacgactgagcaagttcttggaaaaccagagatattagagcggtgaatcgcgctggtcacgttggacacctgcgcgttaggagattctggagccagagggagagaccccagaaacgccccggtcggcgacccagcccgagacgcctggggtcccaagggaagctgaacgcccggtgggctcccgggatggttcttccggttctttgtgccgccttcacccagtgaaggagcctgtatccaccctgcccagtcgctgttgggctgctgcggagcttccgctgccatcttcggatcctgtgttccgcccggggctccaccagggcagggatggtggtgagggtcgctcgtgggtcccctggcagggagcagggtctggcactcacaagggcgcacgactaggacttgtcgaatgaatcccttgtcgcctttagcttttagtcctttgaagagaggtgagagtggaaatcaagagatttttttccacggggaagttctttttacaaagcgttgatttcttggcaccccgcggggcgggcaactgacacggcctccggtgcaccttctgcgctgtggagcctctggggctcagctgggcggtggtcgggtcgtggggcggtagggcgggagcgggggaagggaaagcaaaagctggaaaagaagcaggggagttgtgaaccagacatccagacctcctgaagggctcgtgcagacgtacaggcgggatcttctggaagtgagaattgtttttgtttgtttatctattgtagcagaatggggaaatggagagagaacctgaaagagccccaaactcgaggacctattgctccccaagaataacatcttccagaactagacagaaaactaggcgtctgggaaccctgaaatccttggaggagtagatcatcatgaccctctgtgttccttttggcaaatgacttgcttccattgtttgtttgttcaattgtctgtttgttaaataaataaaaccctttttatgtatctttaaaaaaaaaaaaaaaaaa

SEQ ID NO: 2490 - DNA, 1734 bp, Homo sapien
gaaaaacaaaaagaatctttgttttaccccgaaagagaggcagaggcagaaagtcttcttctgctttttgcatctctaagaggctgaaaaagagaatggaagtgctggggcattttggccagggcagtaatggatatttggagttggcacttccctcagctagaggagtctcagtgtgtctgagaaaatggcagtcagccatccaggattttaggagcaacgccactgctctgtgccacatcagaaatcaggcatggccccaacctgaaggaacttgtagcttaatggggaagcacaccaagaataaaagagcctccagaacatgtggtgcctgtggtcctgagacagcaggaaatggctctcaggccagagttgctggaagaacccatgtggcaggatcggtgggaggcagttacagagggaaacgcccatcccagcaactaggggaggccgccactcctctcgtggatggatgatattcttgcttggggatgttgagacagctgcactctgcatagttcctgatttgcctctctactgctgatgaaaaacctctctttctctatagctgctgcttatattggaaggcttttggttattcagcacactcactcctgagcttatttcagtgatattccttggttatttcgaaacatggatgcttgtggcagatggagagcctgggtgtacacagatctgcctgtgttttgaaatgcataccatgttgccgtttgtttgattgattgatcttggaccacgaaagaaaattatactgacagcttccagggtagggggcagttgtagctttctgcagatgttgccaaatatattgggggtggggagcagcaaatgccatgtgttgctttttatgacataaggagggattccacccccatcccaataaaatcggtgctttgacaaaggagggttcccaggcagctaagagaacccagagtagatgatcctctttatctctggtttaacctgtgactaggattcttggtgtaagctcggcttttccacttatcctctaaccggaacaggcttctataatctctttgccttaaaataattatctgcatccctgtgtagagcaatcttaagcagctctccttgtttcttcagggaatgggaattcttttctaagtcgccccatcaaaggtactattggttttttacaacgccggcgtttgtgtatgtagtaaaagtattaacagcattaaaggcgatatttttaacatgtttatagatactacttgggggagggcagctaatgaaaccttcaagctctatgcagtccacagacgtgagctctgtagagttcgcagaggtgggtaagtacccagccagcacacccagttgaattcagccaggatttattgagttggcatcacagacgctgacagcctccaagtgaaaacccttctcttgaatatgtacaggtttcccatccacataccaagctgatgaggatcccatcgttcttccccagtcctgaggagcccccctcgccatctgcaccttccatagccaaatcagggtcattggactcagaactttcagtgtccccaaaaaggaacagcatctctcggacacacaaagataaggggccttttcacatactgagttcaaccagccagacaaacaaaggaccagaagggcagagccaggcccctgcgtccacctctgcctctacccgcctgtttgggttaacaaagccaaaggaaaagaagg

SEQ ID NO: 2491 - protein, 126 aa, Homo sapien
MEVLGHFGQGSNGYLELALPSARGVSVCLRKWQSAIQDFRSNATALCHIRNQAWPQPEGTCSLMGKHTKNKRASRTCGACGPETAGNGSQARVAGRTHVAGSVGGSYRGKRPSQQLGEAATPLVDG

SEQ ID NO: 2492 - DNA, 2611 bp, Homo sapien
gcaccgttcactggtgggaggctgagccggtggaaaagacaccgggaagagactcagaggcgaccataatgtcgttacgtgtacacactctgcccaccctgcttggagccgtcgtcagaccgggctgcagggagctgctgtgtttgctgatgatcacagtgactgtgggccctggtgcctctggggtgtgccccaccgcttgcatctgtgccactgacatcgtcagctgcaccaacaaaaacctgtccaaggtgcctgggaaccttttcagactgattaagagactggacctgagttataacagaattgggcttctggattctgagtggattccagtatcgtttgcaaagctgaacaccctaattcttcgtcataacaacatcaccagcatttccacgggcagtttttccacaactccaaatttgaagtgtcttgacttatcgtccaataagctgaagacggtgaaaaatgctgtattccaagagttgaaggttctggaagtgcttctgctttacaacaatcacatatcctatctcgatccttcagcgtttggagggctctcccagttgcagaaactctacttaagtggaaattttctcacacagtttccgatggatttgtatgttggaaggttcaagctggcagaactgatgtttttagatgtttcttataaccgaattccttccatgccaatgcaccacataaatttagtgccaggaaaacagctgagaggcatctaccttcatggaaacccatttgtctgtgactgttccctgtactccttgctggtcttttggtatcgtaggcactttagctcagtgatggattttaagaacgattacacctgtcgcctgtggtctgactccaggcactcgcgtcaggtacttctgctccaggatagctttatgaattgctctgacagcatcatcaatggttcctttcgtgcgcttggctttattcatgaggctcaggtcggggaaagactgatggtccactgtgacagcaagacaggtaatgcaaatacggatttcatctgggtgggtccagataacagactgctagagccggataaagagatggaaaacttttacgtgtttcacaatggaagtctggttatagaaagccctcgttttgaggatgctggagtgtattcttgtatcgcaatgaataagcaacgcctgttaaatgaaactgtggacgtcacaataaatgtgagcaatttcactgtaagcagatcccatgctcatgaggcatttaacacagcttttaccactcttgctgcttgcgtggccagtatcgttttggtacttttgtacctctatctgactccatgcccctgcaagtgtaaaaccaagagacagaaaaatatgctacaccaaagcaatgcccattcatcgattctcagtcctggccccgctagtgatgcctccgctgatgaacggaaggcaggtgcaggtaaaagagtggtgtttttggaacccctgaaggatactgcagcagggcagaacgggaaagtcaggctctttcccagcgaggcagtgatagctgagggcatcctaaagtccacgagggggaaatctgactcagattcagtcaattcagtgttttctgacacaccttttgtggcgtccacttaatttgtgcctatatttgtatgatgtcataatttaatctgttcatatttaactttgtgtgtggtctgcaaaataaacagcaggacagaaattgtgttgttttgttctttgaaatacaaccaaattctcttaaaatgattggtaggaaatgaggtaaagtacttcagttcctcaatgtgccagagaaagatggggttgttttccaaagtttaagttctagatcacaatatcttagcttttagcactattggtaatttcagagtaggcccaaaggtgatatgactcccattgtccctttatttaggatattgaaagaaaaaataaactttatgtattagtgtcctttaaaaatagactttgctaacttactagtaccagagttattttaaagaaaaacactagtgtccaatttcatttttaaaagatgtagaaagaagaatcaagcatcaattaattataaagcctaaagcaaagttagatttgggggttattcagccaaaattaccgttttagaccagaatgaatagactacactgataaaatgtactggataatgccacatcctatatggtgttatagaaatagtgcaaggaaagtacatttgtttgcctgtcttttcattttgtacattcttcccattctgtattcttgtacaaaagatctcattgaaaatttaaagtcatcataatttgttgccataaatatgtaagtgtcaataccaaaatgtctgagtaacttcttaaatccctgttctagcaaactaatattggttcatgtgcttgtgtatatgtaaatcttaaattatgtgaactattaaatagaccctactgtactgtgctttggacatttgaattaatgtaaatatatgtaatctgtgacttgatattttgttttatttggctatttaaaaacataaatctaaaatgtcttatgttatcagattatgctattttgtataaagcaccactgatagcaaa

SEQ ID NO: 2493 - protein, 522 aa, Homo sapien
MSLRVHTLPTLLGAVVRPGCRELLCLLMITVTVGPGASGVCPTACICATDIVSCTNKNLSKVPGNLFRLIKRLDLSYNRIGLLDSEWIPVSFAKLNTLILRHNNITSISTGSFSTTPNLKCLDLSSNKLKTVKNAVFQELKVLEVLLLYNNHISYLDPSAFGGLSQLQKLYLSGNFLTQFPMDLYVGRFKLAELMFLDVSYNRIPSMPMHHINLVPGKQLRGIYLHGNPFVCDCSLYSLLVFWYRRHFSSVMDFKNDYTCRLWSDSRHSRQVLLLQDSFMNCSDSIINGSFRALGFIHEAQVGERLMVHCDSKTGNANTDFIWVGPDNRLLEPDKEMENFYVFHNGSLVIESPRFEDAGVYSCIAMNKQRLLNETVDVTINVSNFTVSRSHAHEAFNTAFTTLAACVASIVLVLLYLYLTPCPCKCKTKRQKNMLHQSNAHSSILSPGPASDASADERKAGAGKRVVFLEPLKDTAAGQNGKVRLFPSEAVIAEGILKSTRGKSDSDSVNSVFSDTPFVAST

SEQ ID NO: 2494 - DNA, 2432 bp, Homo sapien
cttcccaccgccagaacgtgcaaataggggataatcagccctgcacggccatcctcagcaatgctgcttatttaacccattttttaaaatgacacttaatgttattggctggcgtacgtgtgtgcgcatacttaaaagttgatgcgtggtgcagctctgctgctaatgtctgctgacagcgtcgcccgatgttgctcagggcctctgggaagaggggacacctttgatgtgggcgtgctggcacccaagaggcaacgtggtcaggctcgatgcttgccagccctggaaggtcccgccagggttggggggtcgggtgagcactcagagatctggggaggaagcgaggagcctggtgtcctcaccaggtgcagaggggaaatgcgtactgctccagaaggttctgactcaagtctcggccctgaggactcagaactcacaagtcatggatcaagtacagagggagggagggccccagcccacccctgcgggggaggaggagggtctgaaggtgggagggcagctccatgagcagccactgttcctgaccagccgaagtgccaggcagggggaggtttccatgtccaggagggagaggacctccaccctctgacctttcagttttccatagcagcccagtgtgaagctcggcgggggtgggcagggcatcaggacaagatgaagatgctggctctggaatggggactccccttgggctaaggggtagtggctggcagaggttgcccagctcttttggaggccacagggaatagaggtggggtggtgcttccgttcctgtgaggcccgcccccctgagccccctcgtctgcttcttgtttggcagaaatagatgtggggcacagcccctagatgatgggaatctgcccaagctgtgccctctggggaatgaaatcttgctcctcgtgcagcttcccctttcccttgcggggtgggggctgggggtgccaaggctccacccttggagggggttgctgggggtgccaaggctccaccctttgctcgctgggcagagggaaggaagcacctccctgtatgctctgcaggggcccctgcaggccactttgcctcagaggaaggaggagaggtcccctgggaaaatgcgcacacacacacacacacacacacacacacacacgcacatgcacacacgcacgcatgcacacacacacacacatatgtgcaggggtgcagcctaagtcagtggagccaggactggctgcgcagctgggcctgccccattcttggagtccccagggaatgagcctcaggatccacttcgtcccttgtttctaagccaggctgcacggccgttcctgggtgtgaaagcattctgtcctgtctccagtcagagggaaccgcccccaaactagaaagctaatttcccccgaaggttcatgaagccagaggcatgcccttgggggttggtcgggagaagggtgagaggcagtgctgtggaaggggcctggcccctgctgcctgcgattccccccgggtatgtggccttctgcctccttcagcctcagtttcctcacctgtaacatgagaataatgatgcctgcctgcccaggccacctcctgggagtgcattggggactctaagtgtaaaactgtcatgaggatggtttatgaagtcccagggaccacacctgccactcagggaagagaccgctgacctcagccatcagccgtgtgcatcgtgaggggcagcgagctcaggacggagagctctcccttggttcggagtcagcacacctgcactcccacacgcccacccagctgtgtgtcctccgccgagggcgagcctctctgtgactcttctgtaaaatgcaccccattctgcccactcctgccacgagacccatcctctgcgatcccgccaggcatgtgtgtgtgaatgcatgtgcaaagctctccatcagaagggtggtgtgggccctgcaggtcctacccctcggccttgaagctccctcgggctgcggactctgcctcctgggtctgagcattagaaccaggagaggggtgtccctgggcagagccaggggtgcaaacagcctgcagccatctggccttttaagtatagtgtgtcgcatttccgggtaggaaggtagcatttcaagttcaaagagaggtcaagtcatgcaaccatctttcctccagcacttttggggtaaggaggacagtttttgttatggtttaggggaaattttcatgaaatttccaccattaccaatagattactgatgtccatggcaagtgatctgttcttggtattttgttttgttttgttttggtttttaaatgtaatcacccattggtcaggcccaggactggtcaccatgagctctgctagccacggccccaacgatgcttccggctctcatggattccacagcaaataaaactgtactgacaac

SEQ ID NO: 2495 - protein, 147 aa, Homo sapien
MMGICPSCALWGMKSCSSCSFPFPLRGGGWGCQGSTLGGGCWGCQGSTLCSLGRGKEAPPCMLCRGPCRPLCLRGRRRGPLGKCAHTHTHTHTHTRTCTHARMHTHTHICAGVQPKSVEPGLAAQLGLPHSWSPQGMSLRIHFVPCF

SEQ ID NO: 2496 - DNA, 2355 bp, Homo sapien
gcagaggaggcggcggaacaccccgggttggtcgggtttccaagggctgacccgagctccagcactttttccgcgcctgatttttcagagctcttcagaaaccaggctgctttcaggaacattgctgtggattcccagggcctattccactagaagcaagatggctgaactcaatactcatgtgaatgtcaaggaaaagatctatgcagttagatcagttgttcccaacaaaagcaataatgaaatagtcctggtgctccaacagtttgattttaatgtggataaagccgtgcaagcctttgtggatggcagtgcaattcaagttctaaaagaatggaatatgacaggaaaaaagaagaacaataaaagaaaaagaagcaagtccaagcagcatcaaggcaacaaagatgctaaagacaaggtggagaggcctgaggcagggcccctgcagccgcagccaccacagattcaaaacggccccatgaatggctgcgagaaggacagctcgtccacagattctgctaacgaaaaaccagcccttatccctcgtgagaaaaagatctcgatacttgaggaaccttcaaaggcacttcgtggggtcacagaaggcaacagactactgcaacagaaactatccttagatgggaaccccaaacctatacatggaacaacagagaggtcagatggcctacagtggtcagctgagcagccttgtaacccaagcaagcctaaggcaaaaacatctcctgttaagtccaatacccctgcagctcatcttgaaataaagccagatgagttggcaaagaaaagaggcccaaatattgagaaatcagtgaaggatttgcaacgctgcaccgtttctctaactagatatcgcgtcatgattaaggaagaagtggatagttccgtgaagaagatcaaagctgcctttgctgaattacacaactgcatcattgacaaagaagtttcattaatggcagaaatggataaagttaaagaagaagccatggaaatcctgactgctcgtcagaagaaagcagaagaactaaagagactcactaaccttgccagtcagatggcagagatgcagctggccgaactcagggcagaaattaagcactttgtcagcgagcgtaaatatgacgaggagctcgggaaagctgcccggttttcctgtgacatcgaacagctgaaggcccaaatcatgctctgcggagaaattacacatccaaagaacaactattcctcaagaactccctgcagctccctgctgcctctgctgaatgcgcacgcagcaacctctgggaaacagagtaacttttcccgaaaatcatccactcacaataagccctctgaaggcaaagcggcaaaccccaaaatggtgagcagtctccccagcaccgccgacccctctcaccagaccatgccggccaacaagcagaatggatcttctaaccaaagacggagatttaatccacagtatcataacaacaggctaaatgggcctgccaagtcgcagggcagtgggaatgaagccgagccactgggaaagggcaacagccgccacgaacacagaagacagccgcacaacggcttccggcccaaaaacaaaggcggtgccaaaaatcaagaggcttccttggggatgaagacccccgaggccccggcccattctgaaaagccccggcgaaggcagcacgctgcagacacctcggaggccaggcccttccggggtagtgtcggtagggtttcacagtgcaatctctgccccacgagaatagaagtttccacagatgcagcagttctctcagtcccggctgtgacgttggtggcctgagctaggaggaaaaagagcagttttcactcagttttggttccctgcccgaggtgctgacccaattcgctgccaaaagagtgtcaatcagaatatacaaatcccgtatggttgtgtcatcctctcttaatcatttttactaattctaataatcagctctagcttgcttcataattttcatggctttgcttgatctgttgatgctttctctcatcaagactttgcagcattttagccaggcagtatttactcattattaggaaaatcaagatgtggctgaagatcagaggctcagttagcaacctgtgttgtagcagtgatgtcagtccatagattgtctttagagagttaatgttacaaaaaagaattcttaataatcagacaaacatgatctgctgaggacacatgcgcttttgtagaatttaacatctggtgtttttctgaaaaaatatatatacatatattgctttatttgaaacaaattaaaatatgctgcatttgaaaaaaaaaaaaaaaaaaaa

SEQ ID NO: 2497 - protein, 558 aa, Homo sapien
MAELNTHVNVKEKIYAVRSVVPNKSNNEIVLVLQQFDFNVDKAVQAFVDGSAIQVLKEWNMTGKKKNNKRKRSKSKQHQGNKDAKDKVERPEAGPLQPQPPQIQNGPMNGCEKDSSSTDSANEKPALIPREKKISILEEPSKALRGVTEGNRLLQQKLSLDGNPKPIHGTTERSDGLQWSAEQPCNPSKPKAKTSPVKSNTPAAHLEIKPDELAKKRGPNIEKSVKDLQRCTVSLTRYRVMIKEEVDSSVKKIKAAFAELHNCIIDKEVSLMAEMDKVKEEAMEILTARQKKAEELKRLTNLASQMAEMQLAELRAEIKHFVSERKYDEELGKAARFSCDIEQLKAQIMLCGEITHPKNNYSSRTPCSSLLPLLNAHAATSGKQSNFSRKSSTHNKPSEGKAANPKMVSSLPSTADPSHQTMPANKQNGSSNQRRRFNPQYHNNRLNGPAKSQGSGNEAEPLGKGNSRHEHRRQPHNGFRPKNKGGAKNQEASLGMKTPEAPAHSEKPRRRQHAADTSEARPFRGSVGRVSQCNLCPTRIEVSTDAAVLSVPAVTLVA

SEQ ID NO: 2498 - DNA, 1853 bp, Homo sapien
ggcacgagggtccctgggccggacggcggtgtcccggcgtggcgggaagccggcactggagcgggagcgcactgggcgcgggaccgggaggcgcagggaccggacggctcccgagtcgcccacctgacgctagaagaagtcttcacttcccaggagagccaaagcgtgtctggccctaggtgggaaaagaactggctgtgacctttgccctgacctggaagggcccagccttgggctgaatggcagcacccacgcccgcccgtccggtgctgacccacctgctggtggctctcttcggcatgggctcctgggctgcggtcaatgggatctgggtggagctacctgtggtggtcaaagagcttccagagggttggagcctcccctcttacgtctctgtgcttgtggctctggggaacctgggtctgctggtggtgaccctctggaggaggctggccccaggaaaggacgagcaggtccccatccgggtggtgcaggtgctgggcatggtgggcacagccctgctggcctctctgtggcaccatgtggccccagtggcaggacagttgcattctgtggccttcttagcactggcctttgtgctggcactggcatgctgtgcctcgaatgtcactttcctgcccttcttgagccacctgccacctcgcttcttacggtcattcttcctgggtcaaggcctgagtgccctgctgccctgcgtgctggccctagtgcagggtgtgggccgcctcgagtgcccgccagcccccatcaacggcacccctggccccccgctcgacttccttgagcgttttcccgccagcaccttcttctgggcactgactgcccttctggtcgcttcagctgctgccttccagggtcttctgctgctgttgccgccaccaccatctgtacccacaggggagttaggatcaggcctccaggtgggagccccaggagcagaggaagaggtggaagagtcctcaccactgcaagagccaccaagccaggcagcaggcaccacccctggtccagaccctaaggcctatcagcttctatcagcccgcagtgcctgcctgctgggcctgttggccgccaccaacgcgctgaccaatggcgtgctgcctgccgtgcagagcttttcctgcttaccctacgggcgtctggcctaccacctggctgtggtgctgggcagtgctgccaatcccctggcctgcttcctggccatgggtgtgctgtgcaggtccttggcagggctgggcggcctctctctgctgggcgtgttctgtgggggctacctgatggcgctggcagtcctgagcccctgcccgcccctggtgggcacctcggcgggggtggtcctcgtggtgctgtcgtgggtgctgtgtcttggcgtgttctcctacgtgaaggtggcagccagctccctgctgcatggcgggggccggccggcattgctggcagccggcgtggccatccaggtgggctctctgctcggcgctgttgctatgttccccccgaccagcatctatcacgtgttccacagcagaaaggactgtgcagacccctgtgactcctgagcctgggcaggtggggaccccgctccccaacacctgtctttccctcaatgctgccaccatgcctgagtgcctgcagcccaggaggcccgcacaccggtacactcgtggacacctacacactccataggagatcctggctttccagggtgggcaagggcaaggagcaggcttggagccagggaccagtgggggctgtagggtaagcccctgagcctgggacctacatgtggtttgcgtaataaaacatttgtatttaaaaaaaaaaaaaaaaaaaaa

SEQ ID NO: 2499 - protein, 445 aa, Homo sapien
MAAPTPARPVLTHLLVALFGMGSWAAVNGIWVELPVVVKELPEGWSLPSYVSVLVALGNLGLLVVTLWRRLAPGKDEQVPIRVVQVLGMVGTALLASLWHHVAPVAGQLHSVAFLALAFVLALACCASNVTFLPFLSHLPPRFLRSFFLGQGLSALLPCVLALVQGVGRLECPPAPINGTPGPPLDFLERFPASTFFWALTALLVASAAAFQGLLLLLPPPPSVPTGELGSGLQVGAPGAEEEVEESSPLQEPPSQAAGTTPGPDPKAYQLLSARSACLLGLLAATNALTNGVLPAVQSFSCLPYGRLAYHLAVVLGSAANPLACFLAMGVLCRSLAGLGGLSLLGVFCGGYLMALAVLSPCPPLVGTSAGVVLVVLSWVLCLGVFSYVKVAASSLLHGGGRPALLAAGVAIQVGSLLGAVAMFPPTSIYHVFHSRKDCADPCDS

SEQ ID NO: 2500 - DNA, 1953 bp, Homo sapien
ggcacgagggtccgcgggagccgccgccgccgccgtcccgtcccagctgccgccccgcgcggccccgccgccggccaggatgctggaggaagcgggcgaggtgctggagaacatgctgaaggcgtcttgtctgcctctcggcttcatcgtcttcctgcccgctgtgctgctgctggtggcgccgccgctgcctgccgccgacgccgcgcacgagttcaccgtgtaccgcatgcagcagtacgacctgcagggccagccctacggcacacggaatgcagtgctgaacacggaggcgcgcacgatggcggcggaggtgctgagccgccgctgcgtgctcatgcggctactggacttctcctacgagcagtaccagaaggccctgcggcagtcggcgggcgccgtggtcatcatcctgcccagggccatggccgccgtgccccaggacgtcgtccggcaattcatggagatcgagccggagatgctggccatggagaccgccgtccccgtgtactttgccgtggaggacgaggccctgctgtctatctacaagcagacccaggctgcctccgcctcccagggctccgcctctgctgctgaagtactgctgcgcacggccactgccaacggcttccagatggtcaccagcggggtacagagcaaggccgtgagtgactggctgattgccagcgtggaggggcggctgacggggctgggcggagaggaccttcccaccatcgtcatcgtggcccactacgacgcctttggagtggccccctggctgtcgctgggcgcggactccaacgggagcggcgtctctgtgctgctggagctggcacgcctcttctcccggctctacacctacaagcgcacgcacgccgcctacaacctcctgttctttgcgtctggaggaggcaagtttaactaccagggaaccaagcgctggctggaagacaacctggaccacacagactccagcctgcttcaggacaatgtggccttcgtgctgtgcctggacaccgtgggccggggcagcagcctgcacctgcacgtgtccaagccgcctcgggagggcaccctgcagcacgccttcctgcgggagctggagacggtggccgcgcaccagttccctgaggtacggttctccatggtgcacaagcggatcaacctggcggaggacgtgctggcctgggagcacgagcgcttcgccatccgccgactgcccgccttcacgctgtcccacctggagagccaccgtgacggtcagcgcagcagcatcatggacgtgcggtcccgggtggattctaagaccctgacccgtaacacgaggatcattgcagaggccctgactcgagtcatctacaacctgacagagaaggggacacccccagacatgccggtgttcacagagcagatgcagatccagcaggagcagctggactcggtgatggactggctcaccaaccagccgcgggccgcgcagctggtggacaaggacagcaccttcctcagcacgctggagcaccacctgagccgctacctgaaggacgtgaagcagcaccacgtcaaggctgacaagcgggacccagagtttgtcttctacgaccagctgaagcaagtgatgaatgcgtacagagtcaagccggccgtctttgacctgctcctggctgttggcattgctgcctacctcggcatggcctacgtggctgtccagcacttcagcctcctctacaagaccgtccagaggctgctcgtgaaggccaagacacagtgacacagccacccccacagccggagcccccgccgctccacagtccctggggccgagcacgagtgagtggacactgccccgccgcgggcggccctgcagggacaggggccctctccctccccggcggtggttggaacactgaattacagagcttttttctgttgctcaaaaaaaaaaaaaaaaaa

SEQ ID NO: 2501 - protein, 552 aa, Homo sapien [sequence omitted]

SEQ ID NO: 2502 - DNA, 2952 bp, Homo sapien
acaaactactccctgagatcctacaatccgcttcatttctaactgctaatggggccttgtatatggctttcttttgcattttaaggaagatacttggaaaattctactcatggactcctggctttggtgccgctctgccagcatcttatgtggccattctcattgaaagaaaaagcaggagagggctgctcacaatttatatggccaacttggtccttttgttttgcatcacagctgccatgtacatgttctttttcaggtgcaaggatggcttgaaaggatttacattttctgcacttaggttcattgtagggaaggaagaaattcccacacattctttttcaccagaggcagcatatgcaaaagtggaacaaaagagagagcaacatgaggaaaaacccagaagaatgaatatgattggtctagtcaggaaatttgtggattcaatatgcaaacatggaccaaggcatagatgttgcaaacattatgaagataattgcatctcttattgcattaaaggtttcatcagaatgtttagcgtggggtacttgatccagtgctgcctccgaatcccttctgcatttaggcatctgtttacacagccatctcggctactttctctcttctacaataaagaaaacttccagcttggagcttttcttggctcttttgttagtatatacaagggtactagttgcttcctgcgctggatcagaaacttagatgatgaactacatgctattatagctggatttttggcaggtacatcaatgatgttttataaaagcacaacaatttccatgtatttagcgtccaaattggtagagacaatgtatttcaaaggcattgaagcagggaaggttccctattttcctcatgcagatactatcatctattccatctctacagcaatttgcttccaggcagctgtcatggaagttcagactttgagaccatcttactggaagttccttttaagactcaccaagggcaaatttgctgtcatgaaccgaaaagtccttgatgtttttggtactggtgcatctaaacactttcaggatttcatccccaggttggatccaagatacacaactgtaacaccagagttgcccacagagttttcctgaagatgactgtaacttattaatgtgactaaatgtttcatcttgaagagttaattatgttgaacacaaaggagggggcccaagctcgaacttcagtgttatttcagttagagatactcttttcatttgttttgtttttcttatgaatcagaaattcagaagctttttaggaagatgttgcttaataattaagcttcctccatagccagaataagattctggatcactgtagtgactgacattatatattattgatcaaattatgtccacaagcaatattatataatctacgtagaagtgtaataacaaacaagagtacacttaaaattactttaaaagatgtctttagttcattccaatataattcttgattaaaattaggattatttctacattttaggatttacaaaggatcacgggtacatgggtttggtctatatatttttttaaagttttgaattggtatctgtagtagtggaatgttatagatttgaagtaactctccacggacagtgctgctttcgtgtagagcaatttaattggagaagtggccattcttacttcagggatgcaaagatgggtctcataccatttggataaatgtcgtggtatccatgctttttttcaactaataacatcatctctcttcatgaccagttaattgggctatttggcagcccagtgaacctatgtactaatggcaagttaggggcaaatggaaatggacacatccgttaaagttgaaatgtatgttttaatctttcacagaagtattacacttgaatatttaaaaacaaaacttttaaacttcctataggtttatgatgtttgttttcatttatatggacataatccttcatagctcagtttatatgccattgttgtattagaagggatcaaaatcctatggaacaaagtagtcttggcaagttggcagtttgtgtcctctcagctgtttaacttatgtaatggatgttttgcacctgaaaacactataaaaatccagtggttgtttaaaaagtccatttgtcactaattccattcaggttctccaaccttcttcttgaatatcattgtcaccatttatactgttagaataaagaggtgacaccataaagtcctgctgataatgagagtagttcaggacagctgtgattgaaatatggtcgctatttacagtttttcagggaaaagttatacttttctatgttaataaagagctgaagtggtctacagttaatgtgacatgtagggatgatgatatttttaaaatacattttgttgctaaaaagttgttaggccagtgcaaattatgcagtagaacttgtgttgcaaaaggaattataacccatactttaaaaatgcttaatccctcatattcaatttcatcaagccttgtatacttctgcttaaatgtaattcaatccttggttgttatggcaaacagaaacccaacaaaaagacagactctggtactatggtaacagagccactttatcatttggtcaaaatttgacattatgattagctttgtagaactgacctgtttatttggcaatgctgttaaaggatcatttcggtttcagacttcaaagttgattaataaatttaatcttaactttttattcactggaatcaaaacgatggttggtactgtgtttactgtttaaaatgaagtactaaagccctgagaactgcacctcattttctttatccagaaattgtgcttatatattttcctgtcaggtttaaaaagatgttttaattcataaattattgttttcattgacattaaaggactgtgatattgaaaaaaaaaaaaaaaaaa

SEQ ID NO: 2503 - protein, 354 aa, Homo sapien
MAFFCILRKILGKFYSWTPGFGAALPASYVAILIERKSRRGLLTIYMANLVLLFCITAAMYMFFFRCKDGLKGFTFSALRFIVGKEEIPTHSFSPEAAYAKVEQKREQHEEKPRRMNMIGLVRKFVDSICKHGPRHRCCKHYEDNCISYCIKGFIRMFSVGYLIQCCLRIPSAFRHLFTQPSRLLSLFYNKENFQLGAFLGSFVSIYKGTSCFLRWIRNLDDELHAIIAGFLAGTSMMFYKSTTISMYLASKLVETMYFKGIEAGKVPYFPHADTIIYSISTAICFQAAVMEVQTLRPSYWKFLLRLTKGKFAVMNRKVLDVFGTGASKHFQDFIPRLDPRYTTVTPELPTEFS

SEQ ID NO: 2504 - DNA, 868 bp, Homo sapien
ggcgggcagaagttggaaacatgcggctgtcggtcgctgcagcgatctcccatggccgcgtatttcgccgtatgggcctcggtcccgagtcccgcatccatctgttgcggaacttgctcacagggctggtgcggcacgaacgcatcgaggcaccatgggcgcgtgtggacgaaatgaggggctacgcggagaagctcatcgactatgggaagctgggagacactaacgaacgagccatgcgcatggctgacttctggctcacagagaaggatttgatcccaaagctgtttcaagtactggcccctcggtacaaagatcaaactgggggctacacaagaatgctgcagatcccaaatcggagtttggatcgggccaagatggcagtgatcgagtataaagggaattgcctcccacccctgcctctgcctcgcagagacagccaccttacactcctaaaccagctgctgcagggtttgcggcaggacctcaggcaaagccaggaagcaagcaaccacagctcccacacagctcaaacaccagggatttaactggatctgaagagtctgcagcccttaatcagtacccatgatcacaggcctttggagcacttttactctctgagaagaactggagctagagatgtaaaatggacagtcttgatggggttgagaaccttctggggagccagatgaccctctctttgcacaatagataaaagtctttatatgaatatatataaatttatttattttttccttcctgtgggatttctggagaatgagaattatccaaatgctcagtctacctgagatagtaaattcatggcttatgcttctggtccttaaatttgggttatttttggttagtg

SEQ ID NO: 2505 - protein, 175 aa, Homo sapien [sequence omitted]

SEQ ID NO: 2506 - DNA, 2213 bp, Homo sapien
tgtctgaaaaaatcaattgactattcccttttcctaaagggcagagacagataatctcacttccagagaaatgacttggagaaaaaaaagtgttggtctttttgctcttttgtaattaaatccggatgtacctcaaaagacttaagactgtggtgataagatgctttcctcagcagaaaggagggaaaaaaaacaactggaactcaaagcttgaaattctgtggcaaaacatgagatgtccaggattggaggttgaaaagatttcactacagtgttctgcaatagttggagcagataactttcagtgtagccacagccatggactccagatttccagattttcaagacctggacctggaacccgaaagagcttgtcacgatgcggcaggaacactggaggtagatttttttttatttttgaattttgggactgttgaccttgctgtgagaaaagagacaacgactgagcaagcactaccaccagcactgttactgggaattagaagacctgagtttctgtccagaccctcagtgcaaactgaggatgctccatccaaagtgaattatgtcctgtgcctcctgattgctgagtgttcacctggaccttctgactaccttccctgtgctattccatcagcctacagacctggtacctggatttttgcccgagatgattcctaccaccttactactgacgaagacacccattccagtggaccactgtgacccaggaggcattcagccatcatgatgtggcctttacctccactcctgtcttgttctacccagattcagcacagccctttatagtgaagtcagagtcctcaagccaaatagctaaagctgttttatcacaacaaaggcctagtttgttccatgagtgtgcatttcatttcttcagttaaagccttcagagacacacaataaatttggaccaggggattttttagttattaatgctctctgaagaaaggcaacatctttttgagagcagcattggaccacaccccacaatctcaaatgattgaaattcatgaacatctaggatcccatgaaggtcactggaccctgttttttctacttcaaatcctgtagtagcctactgaatgagaaaacatattctgacccattgggatcaaatcaaaggcacagtgaactcctcatagcatcttctttggaattactcaggaaccagaactttttacacaaatgtaagaaattctaccaaggagtccccttacctaacagcatctcacaaggctgcaccagattccagaaaaggcttctcttgatacatcaagcattttgtgaccgacttattcttagatcattggttttccaaaggctttgtggccatgaagccctttgagtgaaaactgtgcagaagcccagagtaaaagtgaagctgctctggatgaagtagtgaagcaagagtaggggcctgaatcctgctacaactatcttcctttaccaccgtggtgacacctaaggggacttccttacaacaccttgaactcttccgaacacagtttgaaaaccactgccccagacagcaatatgtttgacctgaatggcattccaatcttttctgtacctccactcagcacagttcatgttcagtagatgctgaacattcttagaaatactgtgtgtgaacttagaaaagtgcaagaagacaggcatgtctttgaccccaggaatgatcatttgctgaagatggtgtcaagtgaacctagattaacagccctccactccagatggatatccagtgattcctagaatgggatatagccagagaacaattctatgcaccctacactgacagactcccttaagcaacaccagatgctctactggtacttgaagtacatgactttgaagtcttgaccctccatgaatacctgaattatcagcaagcgggttttgaagctggtgcctcattgaggccatattagagcaacttgtacatttgacctcttgttatcagccatggtactctacttcgtgtgcaagagataactatgaaagccaaattcaaatactggcaacatttcctaaaggggctcaatatcttatcattcgtcttcttttccaaactacacatcactgtatgactcaaccagtagcagttatattgccccttggtttttattcagtttaactactgtttccaagataaatgagctaataagctttaaaaaaaaaaaaaaaaa

SEQ ID NO: 2507 - protein, 135 aa, Homo sapien
MDSRFPDFQDLDLEPERACHDAAGTLEVDFFLFLNFGTVDLAVRKETTTEQALPPALLLGIRRPEFLSRPSVQTEDAPSKVNYVLCLLIAECSPGPSDYLPCAIPSAYRPGTWIFARDDSYHLTTDEDTHSSGPL

SEQ ID NO: 2508 - DNA, 4853 bp, Homo sapien
  Unsure 239-278: Unknown base
caaggatttgctagctgataaagaactgtgggctcgacttgaagaactagagagacaggaagaattgctgggtgaacttgatagtaagcctgatactgtgattgcaaatggagaagataccacatcttctgaagaggtatacttcttgtgataaggatgttgcaagttcagaaccattcagtggtcaagtgaatagtcagttgaactgttcagtgaatggttccagatcttaccacagnnnnnnnnnnnnnnnnnnnnnnnnnnnnnnnnnnnnnnnnattgacgacgatgatggtgataacgaccatgaggctttaggggttggagataattctataccaacaatatatttttcacatactgttgagcctaagagggtccgaataaatactggaaagaataccactttaaaattcagtgaaaagaaagaagaagccaaacgtaaacgaaagaacagcactggcagtggccactctgcccaggagctgccgaccatcaggacgcctgcagacatttacagagcctttgttgatgttgtgaatggagaatatgtccctcgcaaatccatcctgaagtctcgaagtagagagaatagtgtgtgtagcgacactagtgaaagcagtgctgctgaatttgatgataggcggggagttttgaggagtatcagctgcgaagaagccacttgcagtgacaccagtgagagcattttggaagaggaaccacaagaaaatcaaaagaaacttttgcccttatcagtaacacctgaggtgtgtgtgtgtatcttttaattctttatttcatatagtatctttgaccagttttagctatttaatctgaaaagtcataagattaaattaattctaggttttatactttcttggtactaattaataaaaaattaatagtcacaaacagtacaaatattgtgataatcaaatagtttattttttgataaacacattacttgtcttaacgttctatttcagcaaaatgggaaatttaaaatgtcttacttggcattatgtattacatttgtagctaggaaattatttcgcagtttattttaaataaattaccagtaggtcattttctgatagtgtaaggagcagattacattattctcttttaaataccttggctaagttaaagaaaaataatgcatgcatagcagataattacctaaagtctaatattttaccttgtaccagtgaaacttaactcttgggggattatggaattgttttataatctgatgaaagctgtagaccctgtccatagaaaaaatagtgcacactcaatacactttcacccaccacacttcttacagtttttggtggtggtgcaggggaggttaggaaatccccaaataaggatgtctgtgaaatataaggctattgatttcttcattcttgtgttttggtgcgtatttgaagttttcaatttaaaaagtatttaggaagattggggaacccatgcctggatcaaaccagtgtacacatttgtatatacaataagatacatgcatatatataaccttatctaaaaattccattgcttttactaaatggtattatactcagtgtattaaatggtaattggggatggagattggtagcatttagggacagtacatatgactagaatgttttcttcccctcttcttagtataatgatcttaggtgacctggaaagtatcttaccttatttgatagtcttccatactgttagaaaacaggtaatggatgttatcaggtaattgctgataaatgtttgaaaattagttttttgtaaggacttagtgtatcatggtacagctagagtgtggaacctattttttatttcacccttagtagctttgcattttgtatggaaatgtttaatagtagttgctatacattttttaacatcaaagaaatagttcatgattatggtaagtactttggaagatatccttttcagtatctttttaaatgctaaaatacctctttttcaaaggcattttaaatagaagaaggagaagaaggctctatgctcatcgtgataaagtggagtttttaggaaagtaagctttaagctgcttttaccagttgaactccaaaaataatgtaggagagagatggctttctttgtttttgtttcagtggcggggcaaggtagaagaaggtggctttttaaattatttaggtgttacgttgttttaactaattttgagcacttggtagacagaggagaacaaaatgtacattaaagttcacctgtcaaattttcatttgtagagggaaggatggaggttctaaataccagcaatcttaaaaaaaaaaaaaaatattaactccttgtgtcttacctatttttgtataaaacgacatgtacagatatttccagcaatttatgcacattctttaattctgttccagttgaacatatagttgaccagattaaatgcagcaaacatccaggtgaaattgagtcatttctttttttgtggaacttctgatttctgtcattgagttaattatattaaaattttgaaacctgtacttattcctactagtatcagcacttttatttttcaacttccactgatcttttaaaattgaggcaatatgcagtaaaatatttaaataattgcataaacaccaccaaagagatatcagttagaaatgtcagtactggtgaaactaagctattggctagcaggcagcaaggccatcataggatagctcattcatcaactgatgtacaaaagtcagagtttgacaccctaatagcatttttattttaatacattatttttcacagcatgggctggacatgaatggaatgtatgaaagtttgaagaccttttatttatccatttcttttttttcccagataaaatttacattttacattttgttttcttgcatgtatactgtaaaaattacttctgtttggtggtgaaattaaaacttaatggtgttggtttctctgaacaattagtattttggtgtagtagtgttgtctagccaaaaatctcgtgaatttacttttaatgaaaagaattgccaaatgagtgaatgggaagattttgtgggtgtcttatttgcattttattaccataacctgacttttgttttctaggctttttctggaactgttatagaaaaagaatttgtatcaccttccttaacaccacccccagccattgctcatcccgcactacccactattccagaacgaaaggaagttctgttggaagcatctgaagaaactggaaagagggtttcaaagtttaaagctgccagattgcaacagaaagactaggccctgtctaggaaatgggaatttacatcctaaaacctagttgttcatttgtttagagtatctatagcaaaataggttacatgtagtttgaaataaggtatcctgagttactttggcaacaagttcttttacccttacccgtggtatttgaaaaaaatcaaggtaactgtctgaatactttaatatcagcttgttttgtgaattctctgaatactgtcaacactcctatctaagtttgcctttatgatgcagtggcagcattttgaattacttttcaaagaatactgttcatatgcattgtttttgtgtttcaaactaaatacaggcagatttgtgccagctgtgatattgtgcataccatatggaccattttaaagaaaattttaaaatttcaaatagattcaacaattacattacttgctttcacattttaaaggcactttaaaaaaatctacttctcttgtaggttttgcggctagttggctattcaagaaacctcgcccctctgaatgtcatactgtaatctttaaggaagaaagctacatgaattaattgtactctatgggaaaatttctttggaaagatattttgtaaaacttttttttccaagtaaaaactttatgaaacttggtctcaaaaatgttgtgaactttatgattcaaaattgagtacagatatgtccttgattcatatgtatgctacatgtatcacacaacagatctggaattctttcagttcctcagatacttctcccttagtttttgcagtttcactgggattatgttttgggaaacaaggaaaggtctagatgcttaaacattttaaataaaaattccttacagtttcatcttcccaacattttcattctttaaggctactttcctactaactgaaataacacatttacttttaccacaattcctcaaaataaatttattctaacattgaaaataacattacaagttaatcattagcttgatgcatgctaaaatgtagcttttaaaaagcattctgcattagtactaaaataagccatcaatgccagtccaccctctctattcatggctaaatatttaaaggttatttatagcttctttaatgaattcttcttaaacaaagtgaaattatgtcctagaaaagtagaagctattcgtaactagagcagtgcaactttaaagttttatgaatatgtattttaatgacaagggggcgagcttgcatccccactagttaatggataattcaaaccgaggactgattttgaaagatcacctaaaaatgtagatttgttctttagtaaatttagatcaactatgcatatattttgtaggtaaatctttcagtccatgccccaaccctcaccaaaaccaaagcagaaattacacacacaaagatgctcccgttaggaattgctattcacatgaggctttctgtgctagatttttttctcagaaacaaactttactgtaggactattgtggtgttcttaacagatttgtaatttcaagatgcgtgtcattaaataatttttcatgttcacagacaaa

SEQ ID NO: 2509 - protein, 226 aa, Homo sapien
  unsure 44: unknown amino acid
  unsure 45: unknown amino acid
  unsure 46: unknown amino acid
  unsure 47: unknown amino acid
  unsure 48: unknown amino acid
  unsure 49: unknown amino acid
  unsure 50: unknown amino acid
  unsure 51: unknown amino acid
  unsure 52: unknown amino acid
  unsure 53: unknown amino acid
  unsure 54: unknown amino acid
  unsure 55: unknown amino acid
  unsure 56: unknown amino acid
  unsure 57: unknown amino acid
MEKIPHLLKRYTSCDKDVASSEPFSGQVNSQLNCSVNGSRSYHXXXXXXXXXXXXXXIDDDDGDNDHEALGVGDNSIPTIYFSHTVEPKRVRINTGKNTTLKFSEKKEEAKRKRKNSTGSGHSAQELPTIRTPADIYRAFVDVVNGEYVPRKSILKSRSRENSVCSDTSESSAAEFDDRRGVLRSISCEEATCSDTSESILEEEPQENQKKLLPLSVTPEVCVCIF

SEQ ID NO: 2510 - DNA, 1740 bp, Homo sapien
ccattgttatgtgtgtgcagttttatttaacagtgccgtgtacatggtggacaagctatgaaatatctagtctttagatatttggaagtgcttgatgtattttaaagtagtagtagtagaataacactttttgtaaatagcttttaaaaactgatgggaaatgctgtttggaagtggatttgttgaaccacctgggaggtgggagggaaaaaattgcaaaaggtgttttgccattgtttattagaaaatttcagcttaatccattgcctatatgttacaagcatttcatttaactttgctatactgtatatattgtgtatatactggacaaatgagtcctgattttataatatctagtctgtagctattaaagaggttgccagtgtatgacaaaagtagttagtaaactaatgcattttgtacactttgttaaaattcatagagaggctgtcttctgaaaaggactttttggaagtgaaatgataacatcagctcgaagtgacacatgtgcttatatccaccaggttggtggtggagaggagttggaaggaatgaagggttctagaccagaatgttcctatttagaagacactttcagatataaccattgttacatgtgtgtagtttattcaacagtgctatgtatatagtggacacacttaagtccttatttgaaatatctagtctttctagatgtttagaagtgcacaaagcatgttaaaagtagaggtagtaagtaacacattttgtagttattttgatatgaaatattgtcttggaaattgatcaattctctgagaagtacacgttatgatatttgtgctggttcagggggaagaaggagcacaaagttcaaagggctttctaccagtgtccagtgtgtttatgatgaggcacattgaccattgtcccttatgtctgcattttcgtttactgtgctgtgtatataagcagacataggagtcctaatttatatctagtcgatgttaaagaggttgccagtgtatggcaaaagtagagttagtaaactaatacattgagtacactttgtgttaaaattcataaggaacacttcttaaaaacagaagtaaaattgttaaacgccccccgcccccaagcattacagatggcttatagctgtcaacggggttggtagaggtcagaaagggaagtgttctaggccagaatgttcctatttagaagacactcaaattatagtctatgttatgtatatatgccatttattcaatactactgtgtatataatggaaaacttaagtgcagtttgaaacatctagtctttctaggtgtttaaaagtgcacaatggccaccgtgcccagcccctattttttctgaaataatttttcggatatacttttatatttgaaattagttgaacataagatgatcatcaagcttgctataagttttaagctattgctacatttgaacaaagacccacgtacttatcttagaaagtacttaggatatctttgagattaatggtgctacatcactctacagtactatgtaaaatgaatggagctgctgttcctttctagctagctgtttgtgtagttcatattaatttaccctgccttttatttggattgtctgatttcttagttgtacacatgaacctcattatttgcctggaataagtaatcaaataaaattgctttgataaataggaaaaaaaatctatgtcgggtgcggagaaagaggtaatgaaatggcag

SEQ ID NO: 2511 - protein, 24 aa, Homo sapien
IVMCVQFYLTVPCTWWTSYEISSL

SEQ ID NO: 2512 - DNA, 3452 bp, Homo sapien
gttttgaaagttgatggagcgaactgcttttccaaagactcttttgaaaaactttttaagtaggccattctgactttaacatttctctttgtcttaacattagacaaaaagtaaccttcctgaagaggacatgtgattggaagttgtcaattgttgaagcattggtaactccagtctctaacgttttagaaaatcataacaagcggttctctaccctgtaaaggtgaactactgagttcttcattatgtctgatggagattatgattacctcatcaagtttttagctttgggagactctggtgtagggaagaccagtgtactttaccaatatacagatggtaaatttaactccaaatttatcacaacagtgggcattgatttcagggaaaaaagagtggtgtacagagccagtgggccggatggagccactggcagaggccagagaatccacctgcagttatgggacacagcagggcaggagaggtttcgtagcttaacgacagcgttcttcagagatgctatgggttttcttctactttttgatctgacaaatgagcaaagtttcctcaatgtcagaaactggataagccagctacagatgcatgcatattgtgaaaacccagatatagtgctgtgtggaaacaagagtgatctggaggaccagagagtagtgaaagaggaggaagccatagcactcgcagagaaatatggaatcccctactttgaaactagtgctgccaatgggacaaacataagccaagcaattgagatgcttctggacctgataatgaagcgaatggaacggtgtgtggacaagtcctggattcctgaaggagtggtgcgatcaaatggtcatgcctctacggatcagttaagtgaagaaaaggagaaaggggcatgtggctgttgagaagtcaagtaagcgacatagtagttcaggtggcccatgcctgggatcttctctatgattgatacatggcacagtgagagattaatgggcattgtgtacaaattgcttctcaccatccccattagacctacgaataaagcatccggttctaaaattaatttgttgcagctttgtaaatatttctttaagattcagcctgagagttaggagaaatatttcagagccaaaagtgccttatacaaccttagcctattatagtaaatcattcaaggattcagaattttgcagtcacagaagagtgtatttattatgtagaatgaatgagggtactgtcacctgccttaatgtaggtaggcccagagtcttacatttaagatcttacatgcagttataaaaccgccacagtcttcaatccagatttgaagactcatgccataggtgacattctaaaataccattaaagccacttaaatgttaaataagaatatacatgcacatcagctcaatgtctttgagtattaattttatgtaagcattctatttaacatgaatataggacaaatcatggctatatctatagaccttggataaactggattgaccaattatacactcacggtgacttttttattggtgggaaggggattggggtggggcaggctggcttaatgtaatatgagcaaccaaagtgggacttctgtctccccgctatattcccattgctctgaatggttgattgaagggtcagggaactagattttatggctttagttcactgtgattgtacatttatacttggcctatgtgctggccgcacctgaacatagctggtgcttatgccgagttatttgcgatgagtaaatatttagtttctttttcttcatatttataatgttgatctggcatcctcaggctgcagctttattagcttataacttactcatctctatctttaccagcaggctctgtattgttgatatttgcaacttgttttgcttttccattggtggaattgaaataattagtttttaattacataagatgcctgtttgctatttggtggaagatagatgttcatattgaagcagtcacatttgtactgtagttcaataaaagaaaaatgaagtattctgtagcctatatttttcatagagctcatgagcatttactgtacttgctgggtcttgccaagatcatttattccgctgcattgccaaagtgtcttcataccaaattaaaggtggttttaatatatgtttcatggaagttgtttataaaattcaaaggtatttcatttaggtgaaaagtcttatttattaaagtggtttgaataaagtagatcaaaacttccagagatcttaatggctatataggaagaaatatcactcaccataatttaaataaagaataaaaatacttgtattttgtggtggcaaatgtttggtagaactgtaattagaaaaatacaagtatatttgcgtgatggttacactagaagcccagactttacgactacacaatatattcatgtatctaaactgtacttgtaccccctaaatttatttttaaaaaaggaaaaataaaagtatcatgaaaaaacctatttttttttccactgtccttccactactcccataacaaacttatccatggttggtaaaattttacatatttctatccttgaaatgaaggcttcttttaaattccaaagaagtcatggaggcctgtgcatttgaattgtatatgctagtgaggaaaagatttagacatttcaagagcagggttggccaggcgcggtggctcacacctgtaatcccagcactttgggaggccgaggagggcggatcacgaggtcaggagatcgagaccatcctggctaacacagtgaaaccccatctctactaaaaaaaaaaaaaaaaaaaaaatgggctgggcgtggtggtgggcacctgtagtcccagctactcaggaggctgaggcaggagaatggcgtgaacctgggaggcggagcttgcagtgagccgagattgcgccactgcactccagcctgggcgacagaggagactctgtctcaaaaaaaaaaaaaaaaaaaaagagcagggtcataatcacacagcagtgccttatatagttgccataagacttcagtgcagtacaacataattttacagctacatatcagggcatattctatatggtgtatttgtgttagaataacacattaaatgtctttaaacataaaaataagaatgtttgcatgtttcagttttcaagaaccaaatgagtaattagctatagattccactggccttaaacatacaattaagtgtatacatgatatagtgcacacacaaaagccacctttaattattgaaataacctgtattctttttggaaatcatttaagtttggtattgaagtactatattttttgtgcatcaatgtatttttctatttacaagcctatgtaaaagtgaagtgtatcttcagtgaaccatgtgccaattaagctgtaataaaaaagtggtctagtctgtcaaa

SEQ ID NO: 2513 - protein, 221 aa, Homo sapien; identical to SEQ ID NO: 1468

SEQ ID NO: 2514 - DNA, 580 bp, Homo sapien
agttagtctacaagctgagatacaggctgccaaatttaagataacgatcagtgagatactcgctaaccactcctatccctaggttagaaggtgaaacattattatgccaaaggataaaatcaccttaaatccctagcactgaagtcatctacttactgattagttctcactctatcttatcacttttatttaatctccagttcagaataagtttggttgatgaagcagactagaagtagaaagcactaaaaagtgtgggtcaggaagatggaggaaagggagaggaattcgtagacagatataacagtgtaagtgatagctgtacttcttgactttgaagcataaaagggaaaaaaataaacgtatgctgtctatgataattatcctggattattaaaaaatttataattcctatgatctgaataaaaactcaggaaatatacatttctaaaaaaagtttatccacagtggttttgtttgtttgtttcgtatgagaatgataaaactcttagcagtctttaaaaaaaaaaaacctattagaatgtatagtccatccccacacctggctccaggggtacta

SEQ ID NO: 2515 - protein, 29 aa, Homo sapien
MRMIKLLAVFKKKKPIRMYSPSPHLAPGV

SEQ ID NO: 2516 - DNA, 655 bp, Homo sapien
catgcatggcatggagtgtgtctttgcctcccctgtgcaatccttcttccccaacctgccagctttcctcttatcctgaccacagttcaccaccatcccttttccccaatctcagctgcctggtcagcacctctttcgaacattctgagccccaactttgcagtaaggtggtagaaaatggaaatccagagagctgcaaaaagatttttttttaatgtaatgaatggggagtagttttgtgaacacactcgtattcacctcttctttcctctgggaggcctgcctgccttcccctcccccccaaccttgatccctgtctgctggaaaaggcgcgattgcttctcttcctcttctgcccaagaccaagactctaggtctgatatcctttttagccacacacacacaccccccacacacgaagtcttcttaatcttcttgaatttaccagttactctggacacttcttgccataaccccatttcacagacaaaggcttaggagggaaaaagaaccaaactgtttctgtgtttgtcatgttaatgatgtccatccccacacacccagttcccatccctgatgcttcttgtgcctgtatcttgaaccttcagaatgaaaaaaaaaaaaatctctgggatagctggatacagtttcttta

SEQ ID NO: 2517 - protein, 70 aa, Homo sapien [sequence omitted]
